(19) United States
(12) Patent Application Publication
(10) Pub. No.: US 2022/0362311 A1
(43) Pub. Date: Nov. 17, 2022

(54) OPTIMIZED BACTERIA ENGINEERED TO TREAT DISORDERS INVOLVING THE CATABOLISM OF LEUCINE, ISOLEUCINE, AND/OR VALINE

(71) Applicants: Synlogic Operating Company, Inc., Cambridge, MA (US); Ginkgo Bioworks, Inc., Boston, MA (US)

(72) Inventors: Ning Li, Winchester, MA (US); Jian-Rong Gao, Malden, MA (US); Philippa Jane Reeder Morrison, Arlington, MA (US); Christopher George Bergeron, Fitchburg, MA (US); Dylan Alexander Carlin, Jamaica Plain, MA (US); Laura K. Stone, Cambridge, MA (US); Alex C. Tucker, Dorchester, MA (US); Patrick M. Boyle, Boston, MA (US)

(21) Appl. No.: 17/621,121

(22) PCT Filed: Jun. 19, 2020
(86) PCT No.: PCT/US2020/038675

§ 371 Date: Dec. 20, 2021

Related U.S. Application Data
(60) Provisional application No. 62/864,875, filed on Jun. 21, 2019.
(60) Provisional application No. 62/865,129, filed on Jun. 21, 2019.

(51) Int. Cl. A61K 35/747; A61K 35/741; A61K 35/745; A61K 35/742; A61K 35/744; A61P 13/02; C12N 1/20; C12N 15/52; C12N 15/70

(52) U.S. Cl. CPC A61K 35/747; A61K 35/741; A61K 35/745; A61K 35/742; A61K 35/744; A61P 13/02; C12N 1/205; C12Y 101/01105; C12Y 104/01009; C12N 15/52; C12N 15/70; C12R 2001/19

(57) ABSTRACT

The present disclosure provides recombinant bacterial cells that have been engineered with genetic circuitry which allow the recombinant bacterial cells to sense a patients internal environment and respond by turning an engineered metabolic pathway on or off. When turned on, the recombinant bacterial cells complete all of the steps in a metabolic pathway to achieve a therapeutic effect in a host subject. These recombinant bacterial cells are designed to drive therapeutic effects throughout the body of a host from a point of origin of the microbiome. Specifically, the present disclosure provides recombinant bacterial cells comprising a heterologous gene encoding an improved leucine catabolism enzyme with higher activity and/or specificity for leucine over other branched chain amino acids, such as isoleucine or valine. The disclosure further provides pharmaceutical compositions comprising the recombinant bacteria, and methods for treating disorders involving the catabolism of leucine, isoleucine, and/or valine using the pharmaceutical compositions disclosed herein.

### RELATED APPLICATIONS

[0001] This application claims priority to U.S. Provisional Application No. 62/864,875, filed on Jun. 21, 2019, and U.S. Provisional Application No. 62/865,129, filed on Jun. 21, 2019. The entire contents of each of the foregoing applications are hereby incorporated by reference.

### SEQUENCE LISTING

[0002] The instant application contains a sequence Listing which has been submitted electronically in ASCII format and is hereby incorporated by reference in its entirety. Said ASCII copy, created on Jun. 18, 2020, is named 126046-04220_SL.txt and is 876,737 bytes in size.

### BACKGROUND

[0003] The branched chain amino acids (BCAAs), e.g., leucine, isoleucine, and valine, play an important role in the metabolism of living organisms. Transamination of branched chain amino acids gives rise to their corresponding branched chain α-keto acids (BCKAs) (α-keto-β-methylvalerate, α-ketoisocaproate, and α-ketoisovalerate), which undergo further oxidative decarboxylation to produce acyl-CoA derivatives that enter the TCA cycle. Branched chain amino acids provide a nonspecific carbon source of oxidation for production of energy and also act as a precursor for muscle protein synthesis (Monirujjaman and Ferdouse, Advances in Molec. Biol., 2014, Article ID 36976, 6 pages, 2014).

[0004] Enzyme deficiencies or mutations which lead to the toxic accumulation of branched chain amino acids and their corresponding alpha-keto acids in the blood, cerebrospinal fluid, and tissues result in the development of metabolic disorders associated with the abnormal catabolism of branched chain amino acids in subjects, such as maple syrup urine disease (MSUD), isovaleric acidemia, propionic acidemia, methylmalonic acidemia, and diabetes ketoacidosis. Clinical manifestations of the disease vary depending on the degree of enzyme deficiency and include neurological dysfunction, seizures and death (Homanics et al. 2009).

[0005] Branched chain amino acids, such as leucine, or their corresponding alpha-keto acids, have also been linked to mTor activation (see, for example, Harlan et al., Cell Metabolism, 17:599-606, 2013) which is, in turn, associated with diseases such as cancer, obesity, type 2 diabetes, neurodegeneration, autism, Alzheimer's disease, Lymphangioleiomyomatosis (LAM), transplant rejection, glycogen storage disease, obesity, tuberous sclerosis, hypertension, cardiovascular disease, hypothalamic activation, musculoskeletal disease, Parkinson's disease, Huntington's disease, psoriasis, rheumatoid arthritis, lupus, multiple sclerosis, Leigh's syndrome, and Friedrich's ataxia (see Laplante and Sabatini, Cell, 149(2):74-293, 2012).

[0006] Currently available treatments for disorders involving the catabolism of branched chain amino acids are inadequate for the long term management of the disorders and have severe limitations (Svkvorak, J. Inherit. Metab. Dis., 32(2):229-246, 2009). A low protein/BCAA-restricted diet, with micronutrient and vitamin supplementation, as necessary, is the widely accepted long-term disease management strategy for many such disorders (Homanics et al., BMC Med. Genet., 7:33, 2006). However, BCAA-intake restrictions can be particularly problematic since branched chain amino acids can only be acquired through diet and are necessary for metabolic activities including protein synthesis and branched-chain fatty acid synthesis (Skvorak, 2009). Thus, even with proper monitoring and patient compliance, branched chain amino acid dietary restrictions result in a high incidence of mental retardation and mortality (Skvorak, 2009; Homanics et al., 2009). A few cases of MSUD have been treated by liver transplantation (Popescu and Dima, Liver Transpl., 1:22-28, 2012). However, the limited availability of donor organs, the costs associated with the transplantation itself, and the undesirable effects associated with continued immunosuppressant therapy limit the practicality of liver transplantation for treatment of disorders involving the catabolism of a branched chain amino acid (Homanics et al., 2012; Popescu and Dima, 2012). Therefore, there is significant unmet need for effective, reliable, and/or long-term treatment for disorders involving the catabolism of branched chain amino acids.

### SUMMARY

[0007] The present disclosure relates to compositions and therapeutic methods for reducing one or more excess branched chain amino acids, and/or an accumulated metabolite(s) thereof, for example, by converting the one or more excess branched chain amino acid(s) or accumulated metabolite(s) into alternate by product(s). In certain aspects, the disclosure relates to genetically engineered microorganisms, e.g., bacteria, yeast or viruses, that have been optimized to reduce one or more excess branched chain amino acids, and/or an accumulated metabolite(s) thereof, particularly in low-oxygen conditions, such as in the mammalian gut. In certain aspects, the compositions and methods disclosed herein may be used to treat disorders associated with excess branched chain amino acids and/or an accumulated metabolite(s) thereof, e.g., MSUD.

[0008] Specifically, the present disclosure provides recombinant microorganisms that have been engineered with optimized genetic circuitry, which allows the recombinant microorganism to import and/or metabolize one or more branched chain amino acid and/or one or more metabolite(s) thereof at an improved rate. In some embodiments, the engineered microorganism is capable of sensing a patient's internal environment, e.g., the gut, and responding by turning an engineered metabolic pathway on or off. When turned on, the engineered microorganism, e.g., bacterial, yeast or virus cell, expresses one or more enzymes in a metabolic pathway to achieve a therapeutic effect in a host subject.

[0009] In certain aspects, the present disclosure provides engineered bacterial cells, pharmaceutical compositions thereof, and methods of modulating BCAA(s) and/or metabolite(s) thereof and treating diseases associated with the catabolism of branched chain amino acids. Specifically, the engineered bacteria disclosed herein have been modified to comprise optimized gene sequence(s) encoding one or more enzymes involved in branched chain amino acid catabolism, as well as other circuitry, e.g., to regulate gene expression, including, for example, sequences for one or more inducible promoter(s), sequences for ribosome binding sites, sequences for importing one or more BCAA(s) and/or metabolite(s) thereof into the bacterial cell (e.g., transporter sequence(s)), sequences for the secretion or non-secretion of BCAA(s), metabolites or by-products (e.g., exporter(s) or exporter knockouts), and circuitry to guarantee the safety and non-colonization of the subject that is administered the recombinant bacteria, such as auxotrophies, kill switches, etc. These engineered bacteria are safe and well tolerated and augment the innate activities of the subject's microbiome to achieve a therapeutic effect.

[0010] In one aspect, disclosed herein is a recombinant bacterium capable of consuming leucine at a rate of at least about 0.5 μmol/10⁹ CFU/h in vitro. In one embodiment, the bacterium is capable of consuming leucine at a rate of at least about 0.75 μmol/10⁹ CFU/h. In one embodiment, the bacterium is capable of consuming leucine at a rate of at least about 1 μmol/10⁹ CFU/h. In one embodiment, the bacterium is capable of consuming leucine at a rate of at least about 1.25 μmol/10⁹ CFU/h. In one embodiment, the bacterium is capable of consuming leucine at a rate of at least about 1.5 μmol/10⁹ CFU/h. In one embodiment, the bacterium is capable of consuming leucine at a rate of at least about 1.75 μmol/10⁹ CFU/h. In one embodiment, the bacterium is capable of consuming leucine at a rate of at least about 2 μmol/10⁹ CFU/h. In one embodiment, the bacterium is capable of consuming leucine at a rate of at least about 2.25 μmol/10⁹ CFU/h. In one embodiment, the bacterium is capable of consuming leucine at a rate of at least about 2.5 μmol/10⁹ CFU/h. In one embodiment, the bacterium is capable of consuming leucine at a rate of at least about 2.75 μmol/10⁹ CFU/h.

[0011] In one embodiment, the bacterium is capable of consuming leucine at a rate of about 0.5 to about 2.75 μmol/10⁹ CFU/h. In one embodiment, the bacterium is capable of consuming leucine at a rate of about 0.75 to about 2.75 μmol/10⁹ CFU/h. In one embodiment, the bacterium is capable of consuming leucine at a rate of about 1 to about 2.75 μmol/10⁹ CFU/h. In one embodiment, the bacterium is capable of consuming leucine at a rate of about 1.25 to about 2.75 μmol/10⁹ CFU/h. In one embodiment, the bacterium is capable of consuming leucine at a rate of about 1.75 to about 2.75 μmol/10⁹ CFU/h. In one embodiment, the bacterium is capable of consuming leucine at a rate of about 2 to about 2.75 μmol/10⁹ CFU/h. In one embodiment, the bacterium is capable of consuming leucine at a rate of about 2.25 to about 2.75 μmol/10⁹ CFU/h. In one embodiment, the bacterium is capable of consuming leucine at a rate of about 2.5 to about 2.75 μmol/10⁹ CFU/h. In one embodiment, the bacterium is capable of consuming leucine at a rate of about 0.5 to about 2 μmol/10⁹ CFU/h. In one embodiment, the bacterium is capable of consuming leucine at a rate of about 1 to about 2 μmol/10⁹ CFU/h. In one embodiment, the bacterium is capable of consuming leucine at a rate of about 0.5 to about 2.5 μmol/10⁹ CFU/h.

[0012] In one embodiment, the bacterium comprises at least one gene sequence encoding at least one leucine catabolism enzyme operably linked to at least one directly or indirectly inducible promoter that is not associated with a gene encoding the at least one leucine catabolism enzyme in nature. In one embodiment, the promoter is selected from the group consisting of an FNRS promoter, a Pₜₑₜ promoter, a P_{cmt} promoter, an FNRS promoter, a P_{cl857} promoter, and a P_{BAD} promoter. In one embodiment, the at least one gene sequence encoding the at least one leucine catabolism enzyme is leuDH, kivD, and/or adh2.

[0013] In one embodiment, the bacterium further comprises at least one gene sequence encoding at least one transporter capable of transporting leucine. In one embodiment, the at least one gene sequence encoding the at least one transporter is brnQ.

[0014] In one embodiment, the bacterium comprises an operon, wherein the operon comprises leuDH, kivD, adh2, and brnQ. In one embodiment, the operon comprises a sequence having at least 90% identity to a sequence of any one of SEQ ID NOs: 25-48. In one embodiment, the operon comprises a sequence having at least 95% identity to a sequence of any one of SEQ ID NOs: 25-48. In one embodiment, the operon comprises a sequence comprising a sequence of any one of SEQ ID NOs: 25-48. In one embodiment, the operon comprises a sequence consisting of any one of SEQ ID NOs: 25-48.

[0015] In one embodiment, the leuDH gene encodes a LeuDH protein which comprises a sequence having at least 90% identity to a sequence of any one of SEQ ID NOs: 49-72. In one embodiment, the leuDH gene encodes a LeuDH protein which comprises a sequence having at least 95% identity to a sequence of any one of SEQ ID NOs: 49-72. In one embodiment, the leuDH gene encodes a LeuDH protein which comprises a sequence of any one of SEQ ID NOs: 49-72. In one embodiment, the leuDH gene encodes a LeuDH protein which consists of a sequence of any one of SEQ ID NOs: 49-72.

[0016] In one embodiment, the kivD gene encodes a KivD protein which comprises a sequence having at least 90% identity to a sequence of any one of SEQ ID NOs: 73-96. In one embodiment, the kivD gene encodes a KivD protein which comprises a sequence having at least 95% identity to a sequence of any one of SEQ ID NOs: 73-96. In one embodiment, the kivD gene encodes a KivD protein which comprises a sequence of any one of SEQ ID NOs: 73-96. In one embodiment, the kivD gene encodes a KivD protein which consists of a sequence of any one of SEQ ID NOs: 73-96.

[0017] In one embodiment, the adh2 gene encodes an Adh2 protein which comprises a sequence having at least 90% identity to a sequence of any one of SEQ ID NOs: 97-120. In one embodiment, the adh2 gene encodes an Adh2 protein which comprises a sequence having at least 95% identity to a sequence of any one of SEQ ID NOs: 97-120. In one embodiment, the adh2 gene encodes an Adh2 protein which comprises a sequence of any one of SEQ ID NOs: 97-120. In one embodiment, the adh2 gene encodes an Adh2 protein which consists of a sequence of any one of SEQ ID NOs: 97-120.

[0018] In one embodiment, the brnQ gene encodes a BrnQ protein which comprises a sequence having at least 90% identity to a sequence of any one of SEQ ID NOs: 121-144. In one embodiment, the brnQ gene encodes a BrnQ protein which comprises a sequence having at least 95% identity to a sequence of any one of SEQ ID NOs: 121-144. In one embodiment, the brnQ gene encodes a BrnQ protein which comprises a sequence of any one of SEQ ID NOs: 121-144. In one embodiment, the brnQ gene encodes a BrnQ protein which consists of a sequence of any one of SEQ ID NOs: 121-144.

[0019] In another aspect, disclosed herein is a recombinant bacterium comprising an operon, wherein the operon comprises an optimized leuDH gene which encodes a LeuDH protein, an optimized kivD gene which encodes a KivD protein, and an optimized adh2 gene which encodes an Adh2 protein, and an optimized brnQ gene which encodes a BrnQ protein, wherein the operon comprises a sequence having at least 90% identity to a sequence of any one of SEQ ID NOs: 25-48, and wherein the operon is operably linked to an inducible promoter that is not associated with a leuDH gene, a kivD gene, a adh2 gene, or a brnQ gene in nature.

[0020] In one embodiment, the operon comprises a sequence having at least 95% identity to a sequence of any one of SEQ ID NOs: 25-48. In one embodiment, the operon comprises a sequence of any one of SEQ ID NOs: 25-48. In one embodiment, the operon consists of a sequence of any one of SEQ ID NOs: 25-48.

[0021] In one embodiment, the LeuDH protein comprises a sequence having at least 90% identity to a sequence of any one of SEQ ID NOs: 49-72. In one embodiment, the LeuDH protein comprises a sequence having at least 95% identity to a sequence of any one of SEQ ID NOs: 49-72. In one embodiment, the LeuDH protein comprises a sequence of any one of SEQ ID NOs: 49-72. In one embodiment, the LeuDH protein consists of a sequence of any one of SEQ ID NOs: 49-72.

[0022] In one embodiment, the KivD protein comprises a sequence having at least 90% identity to a sequence of any one of SEQ ID NOs: 73-96. In one embodiment, the KivD protein comprises a sequence having at least 95% identity to a sequence of any one of SEQ ID NOs: 73-96. In one embodiment, the KivD protein comprises a sequence of any one of SEQ ID NOs: 73-96. In one embodiment, the KivD protein consists of a sequence of any one of SEQ ID NOs: 73-96.

[0023] In one embodiment, the Adh2 protein comprises a sequence having at least 90% identity to a sequence of any one of SEQ ID NOs: 97-120. In one embodiment, the Adh2 protein comprises a sequence having at least 95% identity to a sequence of any one of SEQ ID NOs: 97-120. In one embodiment, the Adh2 protein comprises a sequence of any one of SEQ ID NOs: 97-120. In one embodiment, the Adh2 protein comprises a sequence consisting of any one of SEQ ID NOs: 97-120.

[0024] In one embodiment, the BrnQ protein comprises a sequence having at least 90% identity to a sequence of any one of SEQ ID NOs: 121-144. In one embodiment, the BrnQ protein comprises a sequence having at least 95% identity to a sequence of any one of SEQ ID NOs: 121-144. In one embodiment, the BrnQ protein comprises a sequence of any one of SEQ ID NOs: 121-144. In one embodiment, the BrnQ protein consists of a sequence of any one of SEQ ID NOs: 121-144.

[0025] In one embodiment, the at least one gene sequence encoding the at least one leucine catabolism enzyme and the inducible promoter, are integrated into the chromosome of the bacterium. In one embodiment, the at least one gene sequence encoding the at least one leucine catabolism enzyme and the inducible promoter, are located in a plasmid in the bacterium. In another embodiment, the operon and the inducible promoter are integrated into the chromosome of the bacterium. In another embodiment, the operon and the inducible promoter are located in a plasmid in the bacterium.

[0026] In one embodiment, the promoter is selected from the group consisting of an FNRS promoter, a Pₜₑₜ promoter, a P_{cmt} promoter, an FNRS promoter, a P_{cl857} promoter, and a P_{BAD} promoter.

[0027] In one embodiment, the bacterium further comprises a second brnQ gene which encodes a second BrnQ protein, wherein the second brnQ gene is operably linked to an inducible promoter that is not associated with a brnQ gene in nature, and wherein the second brnQ gene is inserted into the malE/K or malP/T locus on a chromosome of the bacterium.

[0028] In one embodiment, the bacterium comprises a genetic modification in leuE that reduces leucine export from the bacterium. In one embodiment, the bacterium comprises a genetic modification in ilvC that reduces endogenous biosynthesis of leucine in the bacterium. In one embodiment, the bacterium further comprises a livKHMGF gene sequence encoding at least one transporter capable of transporting leucine. In one embodiment, the livKHMGF gene sequence is operably linked to at least one promoter that is not associated with a livKHMGF gene in nature.

[0029] In one embodiment, the bacterium is capable of consuming leucine at a rate of at least about 0.5 μmol/10⁹ CFU/h in vitro. In one embodiment, the bacterium is capable of consuming leucine at a rate of at least about 1 μmol/10⁹ CFU/h in vitro. In one embodiment, the bacterium is capable of consuming leucine at a rate of at least about 1.5 μmol/10⁹ CFU/h in vitro. In one embodiment, the bacterium is capable of consuming leucine at a rate of at least about 2.0 μmol/10⁹ CFU/h in vitro. In one embodiment, the bacterium is capable of consuming leucine at a rate of at least about 2.5 μmol/10⁹ CFU/h in vitro. In one embodiment, the bacterium is capable of consuming leucine at a rate of at least about 2.75 μmol/10⁹ CFU/h in vitro.

[0030] In one embodiment, the bacterium is capable of producing isopentanol at a rate of at least about 0.2 μmol/10⁹ CFU/h in vitro. In one embodiment, the bacterium is capable of producing isopentanol at a rate of at least about 0.3 μmol/10⁹ CFU/h in vitro. In one embodiment, the bacterium is capable of producing isopentanol at a rate of at least about 0.4 μmol/10⁹ CFU/h in vitro. In one embodiment, the bacterium is capable of producing isopentanol at a rate of at least about 0.5 μmol/10⁹ CFU/h in vitro. In one embodiment, the bacterium is capable of producing isopentanol at a rate of at least about 0.2 to 0.5 μmol/10⁹ CFU/h in vitro

[0031] In one embodiment, the bacterium exhibits preferentially consumes leucine over valine and isoleucine. In one embodiment, the bacterium exhibits a leucine/valine activity ratio of at least about 1.1 to at least about 2.75. In one embodiment, the bacterium exhibits a leucine/isoleucine activity ratio of at least about 1.1 to at least about 5.

[0032] In one embodiment, the bacterium is a probiotic bacterium selected from the group consisting of Bacteroides, Bifidobacterium, Clostridium, Escherichia, Lactobacillus, and Lactococcus. In one embodiment, the bacterium is Escherichia coli strain Nissle.

[0033] In one aspect, disclosed herein is a pharmaceutically acceptable composition comprising the recombinant bacterium of disclosed herein, and a pharmaceutically acceptable carrier.

[0034] In one aspect, disclosed herein is a method of reducing the level of leucine in a subject, the method comprising a step of administering to the subject a pharmaceutically acceptable composition.

[0035] In one aspect, disclosed herein is a method of treating a disease associated with excess leucine and/or a metabolic disorder involving the abnormal catabolism of leucine in a subject, the method comprising a step of administering to the subject a pharmaceutically acceptable composition.

[0036] In one embodiment, the subject has, or is suspected of having maple syrup urine disease (MSUD).

### BRIEF DESCRIPTION OF THE DRAWINGS

[0037] FIG. 1 depicts graphs showing sequence similar networks for LeuDH (FIG. 1A), KivD (FIG. 1B), and ADH (FIG. 1C) demonstrating diversity of each enzyme metagenomic library. Each spot in FIG. 1(A-C) represents a single amino acid sequence available in sequence databases, and the distance between spots demonstrating relatedness. Each sequence similarity network has a color key with information regarding the annotation or source of the enzyme. For LeuDH enzymes, color indicates the annotation of the enzyme. For KivD and Adh, the color of each spot represents the phylogenetic clade from which the enzyme was sourced. In each network, the seed enzyme sequence from the prototype pathway (SYN1980: comprising ΔleuE, ΔilvC, lacZ:tetR-Ptet-livKHMGF, tetR-Ptet-leuDH(Bc)-kivD-adh2-brnQ-rrnB ter (in low-copy pSC101 plasmid) is indicated by a red dot.

[0038] FIG. 2 depicts a graph showing the LeuDH enzyme activity measured in high throughput. The top 220 LeuDH enzymes from the primary screen were re-screened with increased biological replication (n=4) to validate enzyme activity. Activities are reported as fold-improvement over the B. cereus LeuDH activity.

[0039] FIG. 3 depicts a graph showing the activity specificity for Leu over Val and Ile among the top ˜200 LeuDH enzymes screened for the activity on Leu, Val, and Ile. Activity of LeuDH enzymes on Leu are reported relative the B. cereus LeuDH activity. Specificity was measured as the ratio of activity on Leu relative to Val/Leu. In the left panel, enzyme activity on Leu is reported relative to the Leu/Val specificity. In the right panel, enzyme activity is reported relative to the Leu/Ile specificity. Rationally engineered active site variants are shown in green. Sourced LeuDH enzymes are shown in blue-gray. The negative control is shown in gray. Enzymes exhibited up to ˜2.7-fold preference for Leu over Val, and up to a 5-fold preference for Leu over Ile. The positive control B. cereus LeuDH, shown in red, exhibited equal preference for Leu, Val, and Ile.

[0040] FIG. 4 depicts a graph showing the specificity comparison for Leu/Ile to Leu/Val among the top ˜200 LeuDH enzymes screened for the activity on Leu, Val, and Ile. Specificity was measured as the ratio of activity on Leu relative to Val/Leu. Rationally engineered active site variants are shown in green. Sourced LeuDH enzymes are shown in blue-gray. The negative control is shown in gray. The positive control B. cereus LeuDH, shown in red, showed equal preference for Leu, Val, and Ile when measured in this assay.

[0041] FIG. 5 depicts a graph showing the KivD enzyme activity measured in high throughput. The top 55 KivD enzymes from the primary screen were re-screened for activity with increased biological replication (n=4). Activities are reported as fold-improvement over the S. aureus KivD activity (which was equated to background).

[0042] FIG. 6 depicts a graph showing the Adh enzyme activity measured in high throughput. The top 55 KivD enzymes from the primary screen were re-screened for activity with increased biological replication (n=4). Activities are reported as fold-improvement over the S. cerevisiase ADH2 activity (which was equated to background).

[0043] FIG. 7 depicts a graph showing the consumption of Leu, Ile, and Val within the reaction mixture for each LeuDH enzyme. A total of 21 LeuDH enzymes were screened in cell lysate assays similar to the HTP screen, except that the reaction mixture contained Leu, Val, and Ile at 1:1:1 molar ratio. At least 10 LeuDH enzymes showed improved preference for Leu over Val and Ile when compared to the parent B. subtilis LeuDH. For nearly all LeuDH enzymes, least preference was shown for valine.

[0044] FIG. 8 depicts a graph showing a schematic view of the optimized pathways. Each selected pathway enzyme (6 LeuDH enzymes, 3 KivD enzymes, and 3 Adh enzymes) were each paired with 3 RBSs. The RBS-enzyme pairs were combined in a partial combinatorial library, maintaining the gene order of the prototype pathway and keeping the plasmid-encoded BmQ intact. In the schematic above, unique enzyme sequences for each family are indicated by a unique color. Unique RBSs are indicated with unique grayscale shading.

[0045] FIG. 9 depicts graphs showing pathways with optimized enzymes screened for Leu consumption (top panel) and isopentanol production (bottom panel, same strain order). Strains were assayed in biological triplicate and rank-ordered based on the best performance of any single replicate. The top ˜100 leucine consuming strains are shown here. The control strains are SYN1980 (comprising ΔleuE, ΔilvC, lacZ:tetR-Ptet-livKHMGF, tetR-Ptet-leuDH(Bc)-kivD-adh2-brnQ-rrnB ter (in low-copy pSC101 plasmid)), SYN1980 ΔbrnQ, and SYN1980 ΔleuDH.

[0046] FIG. 10 depicts graphs showing targeted metabolomics of top 10 Leu consuming strains demonstrating improved Leu consumption and relieved KivD bottleneck. Strains harboring the top 10 improved pathways identified in FIG. 9 were characterized for pathway intermediates in the Leu consuming assay. Reactions were sampled at 2-hour intervals over 4 hours.

[0047] FIG. 11 depicts a graph showing the leucine consumption activities of engineered strains SYN5721-SYN5744 optimized for BCAA consumption (comprising ΔleuE, ΔilvC, lacZ:tetR-Ptet-livKHMGF, pSC101-Ptet-optimized operon-brnQ-ampR). SYN5721-SYN5744 were compared against engineered strain SYN1980 (comprising ΔleuE, ΔilvC, lacZ:tetR-Ptet-livKHMGF, tetR-Ptet-leuDH(Bc)-kivD-adh2-brnQ-rrnB ter (in low-copy pSC101 plasmid). Strains were assayed by adding 4 mM leucine to minimum media and sampling at 0, 1, or 2 hour time points after anaerobic incubation.

[0048] FIG. 12 depicts a graph showing engineered strains generated with different host strains to demonstrate the host strain effects on leucine consumption activity. See Table 1 for detailed strain description. Strains were assayed by adding 8 mM leucine to minimum media and sampling at 0, 2, or 4 hour time points after anaerobic incubation.

[0049] FIG. 13 depicts a graph showing engineered strains generated with different inducible promoters operatively linked to the optimized operon to demonstrate the promoter effects on leucine consumption activity. See Table 1 for detailed strain description. Strains were assayed by adding 8 mM leucine to minimum media and sampling at 0, 1.5, or 3 hour time points after anaerobic incubation.

[0050] FIG. 14 depicts graphs showing the ability of engineered strain SYN5941 optimized for BCAA consumption (comprising pSC101-Pₜₑₜ-optimized operon-brnQ-ampR) to consume BCAA in the in vitro gastrointestinal simulation (IVS) model system. SYN5941 was compared against engineered strain SYN1980 (comprising ΔleuE, ΔilvC, lacZ:tetR-Ptet-livKHMGF, tetR-Ptet-leuDH(Bc)-kivD-adh2-brnQ-rrnB ter (in low-copy pSC101 plasmid) and the wild-type strain SYN001 (i.e., EcN). FIG. 14A depicts a higher ability for SYN5941 than SYN1980 and SYN001 to consume leucine (left panel) and produce isopentanol (right panel) in the presence of 5 mM leucine in IVS mimicking the low oxygen tention condition of the human upper gastrointestinal tract. FIG. 14B depicts a higher depicts higher abilities for SYN5941 (left panel) than SYN1980 (right panel) to consume leucine, isoleucine and valine in the presence of a mixture of leucine, isoleucine and valine each at 5 mM.

[0051] FIGS. 15A, 15B, and 15C depict graphs showing the ability of leucine consumption of engineered strain SYN5941 in various conditions. FIG. 15A, FIG. 15B, and FIG. 15C show leucine consumption in increasing concentrations of leucine, increasing pH, and increasing oxygen. For testing the leucine consumption rate under various substrate concentration, 0, 0.63, 1.25, 2.5, 5, 10, 15 or 20 mM of leucine was added into the reaction media. For testing the leucine consumption rate under various pH values, the reaction media was pH at 3, 4, 5, 6, or 7 when performed the assay. For testing the leucine consumption rate under various oxygen concentration, the reaction was carried out at 0, 7 or 21% oxygen by having the reaction in anaerobic chamber, microaerobic chamber or ambient.

[0052] FIG. 16 depicts graphs showing the ability of engineered strain SYN5941 optimized for BCAA consumption (comprising pSC101-Pₜₑₜ-optimized operon-brnQ-ampR) to decrease plasma BCAA levels in vivo in the intermediate MSUD (iMSUD) animal model fed with a high-protein diet, wherein the leucine levels were 1647±265.8 μM in iMSUD males (left panels) and 1165±151.9 μM in iMSUD females (right panels). SYN5941 was compared against engineered strain SYN1980 (comprising ΔleuE, ΔilvC, lacZ:tetR-Ptet-livKHMGF, tetR-Ptet-leuDH(Bc)-kivD-adh2-brnQ-rrnB ter (in low-copy pSC101 plasmid). FIG. 16A, FIG. 16B, and FIG. 16C show plasma leucine, valine and isoleucine concentrations on day 5 of the study. SYN5941 lowered the levels of leucine, isoleucine, and valine more significantly in males than SYN1980. Data were collected from 11 males and 15 females and presented as mean±SEM. Statistical significance determined as p<0.05 using one-way ANOVA followed by Tukey's multiple comparison test. *p<0.05.

[0053] FIG. 17 depicts graphs showing the ability of engineered strain SYN5941 optimized for BCAA consumption (comprising pSC101-Pₜₑₜ-optimized operon-brnQ-ampR) to decrease plasma BCAA levels in vivo in the intermediate MSUD (iMSUD) animal model fed with a high-protein diet, wherein the leucine levels were 2428±485.1 μM in iMSUD males (left panels) and 1626±150.1 μM in iMSUD females (right panels). SYN5941 was compared against engineered strain SYN1980 (comprising ΔleuE, ΔilvC, lacZ:tetR-Ptet-livKHMGF, tetR-Ptet-leuDH(Bc)-kivD-adh2-brnQ-rrnB ter (in low-copy pSC101 plasmid). FIG. 17A, FIG. 17B, and FIG. 17C show plasma leucine, valine and isoleucine concentrations on day 5 of the study. Data were collected from 11 males and 15 females and presented as mean±SEM. Statistical significance determined as p<0.05 using one-way ANOVA followed by Tukey's multiple comparison test. *p<0.05.

[0054] FIG. 18 depicts graphs showing the ability of engineered strain SYN5941 optimized for BCAA consumption (comprising pSC101-Pₜₑₜ-optimized operon-brnQ-ampR) to decrease plasma BCAA levels in vivo in healthy non-human primates. SYN5941 was compared against engineered strain SYN1980 (comprising ΔleuE, ΔilvC, lacZ:tetR-Ptet-livKHMGF, tetR-Ptet-leuDH(Bc)-kivD-adh2-brnQ-rrnB ter (in low-copy pSC101 plasmid). An orally administered vehicle (15% glycerol in PBS) served as control. FIG. 18A, FIG. 18B, and FIG. 18C show plasma leucine, valine and isoleucine concentrations as a function of time. FIG. 18D, FIG. 18E, and FIG. 18F show area under the curves. SYN5941 lowered the levels of leucine more significantly than SYN1980. Data collected from n=10-12 animals and presented as mean±SEM. Statistical significance determined as p<0.05 using two-way ANOVA (top) or one-way ANOVA (bottom) followed by Tukey's multiple comparison test.

[0055] FIG. 19 depicts a schematic view of the intermediate MSUD (iMSUD) animal model design.

[0056] FIG. 20 depicts a graph showing a comparison of the rate of Leu consumption over time between top Leu consuming strains (5941, 5942 and 5943) and a prototype strain (1980). 8 mM leucine was added to minimum media and samples were taken at 0, 2, and 4 hour time points after anaerobic incubation.

[0057] FIG. 21 depicts a graph showing extracellular profiles of the isopentanol pathway intermediates for SYN5941 assayed in Ambr15 bioreactors (n=2). Error bars reflect standard deviation across the duplicate bioreactors. The “Sum” shown in black bars represents the aggregate total concentration of the intermediates shown. Leu=Leucine, Acid=2-oxoisocaproate, Aldehyde=isovaleraldehyde, Alcohol=isopentanol.

### DETAILED DESCRIPTION

[0058] The disclosure includes optimized, engineered, and programmed microorganisms, e.g., bacteria, yeast, and viruses, pharmaceutical compositions thereof, and methods of modulating and treating disorders involving the catabolism of a branched chain amino acid, such as leucine, valine, and isoleucine. In some embodiments, the microorganism, e.g., bacterium, yeast, or virus, has been engineered to comprise heterologous gene sequence(s) encoding one or more branched chain amino acid catabolism enzyme(s), such as a leucine catabolism enzyme.

[0059] In some embodiments, the engineered microorganism, e.g., engineered bacterium, comprises optimized heterologous gene sequence(s) encoding one or more branched chain amino acid catabolism enzyme(s) and is capable of reducing the level of one or more branched chain amino acids and/or corresponding alpha-keto acid(s) and/or other corresponding metabolite(s). For example, the engineered bacterium, may comprise a BCAA transporter, such as LivKHMGF and/or BmQ. In some embodiments, the engineered bacterium comprises heterologous gene sequence(s) encoding one or more branched chain amino acid catabolism enzyme(s) and is capable of metabolizing one or more branched chain amino acids and/or corresponding alpha-keto acid(s) and/or other corresponding metabolite(s). In some embodiments, the engineered bacterium comprises heterologous gene sequence(s) encoding one or more branched chain amino acid catabolism enzyme(s) and is capable of transporting one or more branched chain amino acids and/or corresponding alpha-keto acid(s) and/or other corresponding metabolite(s) into the bacterium. In some embodiments, the engineered bacterium comprises heterologous gene sequence(s) encoding one or more branched chain amino acid catabolism enzyme(s) and is capable of reducing the level of and/or metabolizing one or more branched chain amino acids and/or corresponding alpha-keto acid(s) and/or other corresponding metabolite(s) in low-oxygen environments, e.g., the gut. In some embodiments, the engineered bacteria convert the branched chain amino acid(s) and/or corresponding alpha-keto acid(s) and/or other corresponding metabolite(s) to a non-toxic or low toxicity metabolite, e.g., isovaleraldehyde, isobutyraldehyde, 2-methylbutyraldehyde, isovaleric acid, isobutyric acid, 2-methylbutyric acid, isopentanol, isobutanol, and 2-methylbutanol. In some embodiments, the engineered bacterium comprises a genetic modification that reduces export of a branched chain amino acid from the bacterial cell, for example, the bacterial cell may comprise a knockout or knock-down of a gene that encodes a BCAA exporter, such as leuE (which encodes a leucine exporter). In some embodiments, the engineered bacterium comprises gene sequence(s) or gene cassette(s) encoding one or more transporters of a branched chain amino acid, which transporters function to import one or more BCAA(s) into the bacterial cell. In some embodiments, the bacterium has been engineered to comprise a genetic modification that reduces or inhibits endogenous production of one or more branched chain amino acids and/or one or more corresponding alpha-keto acids or other metabolite(s), for example, the bacterium may comprise a knockout or knock-down of a gene that encodes a molecule required for BCAA synthesis, such as ilvC (which encodes keto acid reductoisomerase). In some embodiments, the bacterium has been engineered to comprise an auxotroph, including, for example, a BCAA auxotrophy, such as ilvC (which is required for BCAA synthesis and requires the cell to import isoleucine and valine to survive) or other auxotrophy, as provided herein and known in the art, e.g., thyA auxotrophy. In some embodiments, the bacterium has been engineered to comprise a kill-switch, such as any of the kill-switches provided herein and known in the art. In some embodiments, the bacterium has been engineered to comprise antibiotic resistance, such as any of the antibiotic resistance provided herein and known in the art. In any of these embodiments, the gene sequence(s) encoding one or more branched chain amino acid catabolism enzyme(s), transporter(s), and other molecules can be integrated into the bacterial chromosome and/or can be present on a plasmid(s) (low copy and/or high copy). In any of these embodiments, the gene sequence(s) encoding one or more branched chain amino acid catabolism enzyme(s), transporter(s), and other molecules can be under the control of an inducible or constitutive promoter. Exemplary inducible promoters described herein include oxygen level-dependent promoters (e.g., FNR-inducible promoter), promoters induced by inflammation or an inflammatory response (RNS, ROS promoters), and promoters induced by a metabolite that may or may not be naturally present (e.g., can be exogenously added) in the gut, e.g., arabinose and tetracycline.

[0060] Thus, the recombinant bacterial cells and pharmaceutical compositions comprising the bacterial cells disclosed herein may be used to catabolize branched chain amino acids, e.g., leucine, isoleucine, valine, and/or their corresponding alpha-keto acid counterparts, to modify, ameliorate, treat and/or prevent conditions associated with disorders involving the catabolism of a branched chain amino acid. In one embodiment, the disorder involving the catabolism of a branched chain amino acid is a metabolic disorder involving the abnormal catabolism of a branched chain amino acid, including but not limited to maple syrup urine disease (MSUD), isovaleric acidemia, propionic acidemia, methylmalonic acidemia, or diabetes ketoacidosis, 3-MCC Deficiency, 3-Methylglutaconyl-CoA hydratase Deficiency, HMG-CoA Lyase Deficiency, Acetyl-CoA Carboxylase Deficiency, Malonyl-CoA Decarboxylase Deficiency, short-branched chain acylCoA dehydrogenase deficiency, 2-methyl-3-hydroxybutyric acidemia, beta-ketothiolase deficiency, isobutyryl-CoA dehydrogenase deficiency, HIBCH deficiency), and 3-Hydroxyisobutyric aciduria. In another embodiment, the disorder involving the catabolism of a branched chain amino acid is a disorder caused by the activation of mTor, for example, cancer, obesity, type 2 diabetes, neurodegeneration, autism, Alzheimer's disease, Lymphangioleiomyomatosis (LAM), transplant rejection, glycogen storage disease, obesity, tuberous sclerosis, hypertension, cardiovascular disease, hypothalamic activation, musculoskeletal disease, Parkinson's disease, Huntington's disease, psoriasis, rheumatoid arthritis, lupus, multiple sclerosis, Leigh's syndrome, and Friedrich's ataxia.

### Definitions

[0061] In order that the disclosure may be more readily understood, certain terms are first defined. These definitions should be read in light of the remainder of the disclosure and as understood by a person of ordinary skill in the art. Unless defined otherwise, all technical and scientific terms used herein have the same meaning as commonly understood by a person of ordinary skill in the art. Additional definitions are set forth throughout the detailed description.

[0062] As used herein, the term “recombinant microorganism” refers to a microorganism, e.g., bacterial, yeast or viral cell, or bacteria, yeast or virus, that has been genetically modified from its native state. Thus, a “recombinant bacterial cell” or “recombinant bacteria” refers to a bacterial cell or bacteria that have been genetically modified from their native state. For instance, a recombinant bacterial cell may have nucleotide insertions, nucleotide deletions, nucleotide rearrangements, and nucleotide modifications introduced into their DNA. These genetic modifications may be present in the chromosome of the bacteria or bacterial cell, or on a plasmid in the bacteria or bacterial cell. Recombinant bacterial cells disclosed herein may comprise exogenous nucleotide sequences on plasmids. Alternatively, recombinant bacterial cells may comprise exogenous nucleotide sequences stably incorporated into their chromosome.

[0063] A “programmed or engineered microorganism” refers to a microorganism, e.g., bacterial, yeast, or viral cell, or bacteria, yeast, or virus, that has been genetically modified from its native state to perform a specific function. Thus, a “programmed or engineered bacterial cell” or “programmed or engineered bacteria” refers to a bacterial cell or bacteria that has been genetically modified from its native state to perform a specific function, e.g., to metabolize a branched chain amino acid. In certain embodiments, the programmed or engineered bacterial cell has been modified to express one or more proteins, for example, one or more proteins that have a therapeutic activity or serve a therapeutic purpose. The programmed or engineered bacterial cell may additionally have the ability to stop growing or to destroy itself once the protein(s) of interest have been expressed.

[0064] As used herein, the term “gene” refers to a nucleic acid fragment that encodes a protein or fragment thereof, optionally including regulatory sequences preceding (5′ non-coding sequences) and following (3′ non-coding sequences) the coding sequence. In one embodiment, a “gene” does not include regulatory sequences preceding and following the coding sequence. A “native gene” refers to a gene as found in nature, optionally with its own regulatory sequences preceding and following the coding sequence. A “chimeric gene” refers to any gene that is not a native gene, optionally comprising regulatory sequences preceding and following the coding sequence, wherein the coding sequences and/or the regulatory sequences, in whole or in part, are not found together in nature. Thus, a chimeric gene may comprise regulatory sequences and coding sequences that are derived from different sources, or regulatory and coding sequences that are derived from the same source, but arranged differently than is found in nature.

[0065] As used herein, the term “gene sequence” is meant to refer to a genetic sequence, e.g., a nucleic acid sequence. The gene sequence or genetic sequence is meant to include a complete gene sequence or a partial gene sequence. The gene sequence or genetic sequence is meant to include sequence that encodes a protein or polypeptide and is also meant to include genetic sequence that does not encode a protein or polypeptide, e.g., a regulatory sequence, leader sequence, signal sequence, or other non-protein coding sequence.

[0066] As used herein, a “heterologous” gene or “heterologous sequence” refers to a nucleotide sequence that is not normally found in a given cell in nature. As used herein, a heterologous sequence encompasses a nucleic acid sequence that is exogenously introduced into a given cell and can be a native sequence (naturally found or expressed in the cell) or non-native sequence (not naturally found or expressed in the cell) and can be a natural or wild-type sequence or a variant, non-natural, or synthetic sequence. “Heterologous gene” includes a native gene, or fragment thereof, that has been introduced into the host cell in a form that is different from the corresponding native gene. For example, a heterologous gene may include a native coding sequence that is a portion of a chimeric gene to include non-native regulatory regions that is reintroduced into the host cell. A heterologous gene may also include a native gene, or fragment thereof, introduced into a non-native host cell. Thus, a heterologous gene may be foreign or native to the recipient cell; a nucleic acid sequence that is naturally found in a given cell but expresses an unnatural amount of the nucleic acid and/or the polypeptide which it encodes; and/or two or more nucleic acid sequences that are not found in the same relationship to each other in nature. As used herein, the term “endogenous gene” refers to a native gene in its natural location in the genome of an organism. As used herein, the term “transgene” refers to a gene that has been introduced into the host organism, e.g., host bacterial cell, genome.

[0067] As used herein, a “non-native” nucleic acid sequence refers to a nucleic acid sequence not normally present in a microorganism, e.g., an extra copy of an endogenous sequence, or a heterologous sequence such as a sequence from a different species, strain, or substrain of bacteria, yeast, or virus, or a sequence that is modified and/or mutated as compared to the unmodified sequence from bacteria, yeast, or virus of the same subtype. In some embodiments, the non-native nucleic acid sequence is a synthetic, non-naturally occurring sequence (see, e.g., Purcell et al., 2013). The non-native nucleic acid sequence may be a regulatory region, a promoter, a gene, and/or one or more genes in gene cassette. In some embodiments, “non-native” refers to two or more nucleic acid sequences that are not found in the same relationship to each other in nature. The non-native nucleic acid sequence may be present on a plasmid or chromosome. In some embodiments, the genetically engineered microorganism of the disclosure comprises a gene that is operably linked to a promoter that is not associated with said gene in nature. For example, in some embodiments, the genetically engineered bacteria disclosed herein comprise a gene that is operably linked to a directly or indirectly inducible promoter that is not associated with said gene in nature, e.g., an FNR responsive promoter (or other promoter disclosed herein) operably linked to a gene encoding a branched chain amino acid catabolism enzyme. In some embodiments, the genetically engineered yeast or virus of the disclosure comprises a gene that is operably linked to a directly or indirectly inducible promoter that is not associated with said gene in nature, e.g., a promoter operably linked to a gene encoding a branched chain amino acid catabolism enzyme.

[0068] As used herein, the term “coding region” refers to a nucleotide sequence that codes for a specific amino acid sequence. The term “regulatory sequence” refers to a nucleotide sequence located upstream (5′ non-coding sequences), within, or downstream (3′ non-coding sequences) of a coding sequence, and which influences the transcription, RNA processing, RNA stability, or translation of the associated coding sequence. Examples of regulatory sequences include, but are not limited to, promoters, translation leader sequences, effector binding sites, signal sequences, and stem-loop structures. In one embodiment, the regulatory sequence comprises a promoter, e.g., an FNR responsive promoter or another promoter disclosed herein.

[0069] “Operably linked” refers to the association of nucleic acid sequences on a single nucleic acid fragment so that the function of one is affected by the other. A regulatory element is operably linked with a coding sequence when it is capable of affecting the expression of the gene coding sequence, regardless of the distance between the regulatory element and the coding sequence. More specifically, operably linked refers to a nucleic acid sequence, e.g., a gene encoding a branched chain amino acid catabolism enzyme, that is joined to a regulatory sequence in a manner which allows expression of the nucleic acid sequence, e.g., the gene encoding the branched chain amino acid catabolism enzyme. In other words, the regulatory sequence acts in cis. In one embodiment, a gene may be “directly linked” to a regulatory sequence in a manner which allows expression of the gene. In another embodiment, a gene may be “indirectly linked” to a regulatory sequence in a manner which allows expression of the gene. In one embodiment, two or more genes may be directly or indirectly linked to a regulatory sequence in a manner which allows expression of the two or more genes. A regulatory region or sequence is a nucleic acid that can direct transcription of a gene of interest and may comprise promoter sequences, enhancer sequences, response elements, protein recognition sites, inducible elements, promoter control elements, protein binding sequences, 5′ and 3′ untranslated regions, transcriptional start sites, termination sequences, polyadenylation sequences, and introns.

[0070] A “promoter” as used herein, refers to a nucleotide sequence that is capable of controlling the expression of a coding sequence or gene. Promoters are generally located 5′ of the sequence that they regulate. Promoters may be derived in their entirety from a native gene, or be composed of different elements derived from promoters found in nature, and/or comprise synthetic nucleotide segments. Those skilled in the art will readily ascertain that different promoters may regulate expression of a coding sequence or gene in response to a particular stimulus, e.g., in a cell- or tissue-specific manner, in response to different environmental or physiological conditions, or in response to specific compounds. Prokaryotic promoters are typically classified into two classes: inducible and constitutive. A “constitutive promoter” refers to a promoter that allows for continual transcription of the coding sequence or gene under its control.

[0071] “Constitutive promoter” refers to a promoter that is capable of facilitating continuous transcription of a coding sequence or gene under its control and/or to which it is operably linked. Constitutive promoters and variants are well known in the art and include, but are not limited to, Ptac promoter, BBa_J23100, a constitutive Escherichia coli σ^{S} promoter (e.g., an osmY promoter (International Genetically Engineered Machine (iGEM) Registry of Standard Biological Parts Name BBa_J45992; BBa_J45993)), a constitutive Escherichia coli σ³² promoter (e.g., htpG heat shock promoter (BBa_J45504)), a constitutive Escherichia coli σ⁷⁰ promoter (e.g., lacq promoter (BBa_J54200; BBa_J56015), E. coli CreABCD phosphate sensing operon promoter (BBa_J64951), GlnRS promoter (BBa_K088007), lacZ promoter (BBa_K119000; BBa_K119001); M13K07 gene I promoter (BBa_M13101); M13K07 gene II promoter (BBa_M13102), M13K07 gene III promoter (BBa_M13103), M13K07 gene IV promoter (BBa_M13104), M13K07 gene V promoter (BBa_M13105), M13K07 gene VI promoter (BBa_M13106), M13K07 gene VIII promoter (BBa_M13108), M13110 (BBa_M13110)), a constitutive Bacillus subtilis σ^{A} promoter (e.g., promoter veg (BBa_K143013), promoter 43 (BBa_K143013), P_{liaG} (BBa_K823000), P_{lepA} (BBa_K823002), P_{veg} (BBa_K823003)), a constitutive Bacillus subtilis σ^{B} promoter (e.g., promoter ctc (BBa_K143010), promoter gsiB (BBa_K143011)), a Salmonella promoter (e.g., Pspv2 from Salmonella (BBa_K112706), Pspv from Salmonella (BBa_K112707)), a bacteriophage T7 promoter (e.g., T7 promoter (BBa I712074; BBa 1719005; BBa_J34814; BBa_J64997; BBa_K113010; BBa_K113011; BBa_K113012; BBa_R0085; BBa_R0180; BBa_R0181; BBa_R0182; BBa_R0183; BBa_Z0251; BBa_Z0252; BBa_Z0253)), and a bacteriophage SP6 promoter (e.g., SP6 promoter (BBa_J64998)).

[0072] An “inducible promoter” refers to a regulatory region that is operably linked to one or more genes, wherein expression of the gene(s) is increased in the presence of an inducer of said regulatory region. An “inducible promoter” refers to a promoter that initiates increased levels of transcription of the coding sequence or gene under its control in response to a stimulus or an exogenous environmental condition. A “directly inducible promoter” refers to a regulatory region, wherein the regulatory region is operably linked to a gene encoding a protein or polypeptide, where, in the presence of an inducer of said regulatory region, the protein or polypeptide is expressed. An “indirectly inducible promoter” refers to a regulatory system comprising two or more regulatory regions, for example, a first regulatory region that is operably linked to a first gene encoding a first protein, polypeptide, or factor, e.g., a transcriptional regulator, which is capable of regulating a second regulatory region that is operably linked to a second gene, the second regulatory region may be activated or repressed, thereby activating or repressing expression of the second gene. Both a directly inducible promoter and an indirectly inducible promoter are encompassed by “inducible promoter.” Exemplary inducible promoters described herein include oxygen level-dependent promoters (e.g., FNR-inducible promoter), promoters induced by inflammation or an inflammatory response (RNS, ROS promoters), and promoters induced by a metabolite that may or may not be naturally present (e.g., can be exogenously added) in the gut, e.g., arabinose and tetracycline. Examples of inducible promoters include, but are not limited to, an FNR responsive promoter, a P_{araC} promoter, a P_{araBAD} promoter, and a P_{TetR} promoter, each of which are described in more detail herein. Examples of other inducible promoters are provided herein below.

[0073] As used herein, “stably maintained” or “stable” bacterium is used to refer to a bacterial host cell carrying non-native genetic material, e.g., a gene encoding a branched chain amino acid catabolism enzyme, which is incorporated into the host genome or propagated on a self-replicating extra-chromosomal plasmid, such that the non-native genetic material is retained, expressed, and propagated. The stable bacterium is capable of survival and/or growth in vitro, e.g., in medium, and/or in vivo, e.g., in the gut. For example, the stable bacterium may be a genetically engineered bacterium comprising a gene encoding a branched chain amino acid catabolism enzyme, in which the plasmid or chromosome carrying the gene is stably maintained in the bacterium, such that branched chain amino acid catabolism enzyme can be expressed in the bacterium, and the bacterium is capable of survival and/or growth in vitro and/or in vivo. In some embodiments, copy number affects the stability of expression of the non-native genetic material. In some embodiments, copy number affects the level of expression of the non-native genetic material.

[0074] As used herein, the term “expression” refers to the transcription and stable accumulation of sense (mRNA) or anti-sense RNA derived from a nucleic acid, and/or to translation of an mRNA into a polypeptide.

[0075] As used herein, the term “plasmid” or “vector” refers to an extrachromosomal nucleic acid, e.g., DNA, construct that is not integrated into a bacterial cell's genome. Plasmids are usually circular and capable of autonomous replication. Plasmids may be low-copy, medium-copy, or high-copy, as is well known in the art. Plasmids may optionally comprise a selectable marker, such as an antibiotic resistance gene, which helps select for bacterial cells containing the plasmid and which ensures that the plasmid is retained in the bacterial cell. A plasmid disclosed herein may comprise a nucleic acid sequence encoding a heterologous gene, e.g., a gene encoding a branched chain amino acid catabolism enzyme.

[0076] As used herein, the term “transform” or “transformation” refers to the transfer of a nucleic acid fragment into a host bacterial cell, resulting in genetically-stable inheritance. Host bacterial cells comprising the transformed nucleic acid fragment are referred to as “recombinant” or “transgenic” or “transformed” organisms.

[0077] The term “genetic modification,” as used herein, refers to any genetic change. Exemplary genetic modifications include those that increase, decrease, or abolish the expression of a gene, including, for example, modifications of native chromosomal or extrachromosomal genetic material. Exemplary genetic modifications also include the introduction of at least one plasmid, modification, mutation, base deletion, base addition, base substitution, and/or codon modification of chromosomal or extrachromosomal genetic sequence(s), gene over-expression, gene amplification, gene suppression, promoter modification or substitution, gene addition (either single or multi-copy), antisense expression or suppression, or any other change to the genetic elements of a host cell, whether the change produces a change in phenotype or not. Genetic modification can include the introduction of a plasmid, e.g., a plasmid comprising a branched chain amino acid catabolism enzyme operably linked to a promoter, into a bacterial cell. Genetic modification can also involve a targeted replacement in the chromosome, e.g., to replace a native gene promoter with an inducible promoter, regulated promoter, strong promoter, or constitutive promoter. Genetic modification can also involve gene amplification, e.g., introduction of at least one additional copy of a native gene into the chromosome of the cell. Alternatively, chromosomal genetic modification can involve a genetic mutation.

[0078] As used herein, the term “genetic mutation” refers to a change or changes in a nucleotide sequence of a gene or related regulatory region that alters the nucleotide sequence as compared to its native or wild-type sequence. Mutations include, for example, substitutions, additions, and deletions, in whole or in part, within the wild-type sequence. Such substitutions, additions, or deletions can be single nucleotide changes (e.g., one or more point mutations), or can be two or more nucleotide changes, which may result in substantial changes to the sequence. Mutations can occur within the coding region of the gene as well as within the non-coding and regulatory sequence of the gene. The term “genetic mutation” is intended to include silent and conservative mutations within a coding region as well as changes which alter the amino acid sequence of the polypeptide encoded by the gene. A genetic mutation in a gene coding sequence may, for example, increase, decrease, or otherwise alter the activity (e.g., enzymatic activity) of the gene's polypeptide product. A genetic mutation in a regulatory sequence may increase, decrease, or otherwise alter the expression of sequences operably linked to the altered regulatory sequence.

[0079] Specifically, the term “genetic modification that reduces export of a branched chain amino acid from the bacterial cell” refers to a genetic modification that reduces the rate of export or quantity of export of a branched chain amino acid from the bacterial cell, as compared to the rate of export or quantity of export of the branched chain amino acid from a bacterial cell not having said modification, e.g., a wild-type bacterial cell. In one embodiment, a recombinant bacterial cell having a genetic modification that reduces export of a branched chain amino acid from the bacterial cell comprises a genetic mutation in a native gene, e.g., a leuE gene. In another embodiment, a recombinant bacterial cell having a genetic modification that reduces export of a branched chain amino acid from the bacterial cell comprises a genetic mutation in a native promoter, e.g., a leuE promoter, which reduces or inhibits transcription of the leuE gene. In another embodiment, a recombinant bacterial cell having a genetic modification that reduces export of a branched chain amino acid from the bacterial cell comprises a genetic mutation leading to overexpression of a repressor of an exporter of a branched chain amino acid. In another embodiment, a recombinant bacterial cell having a genetic modification that reduces export of a branched chain amino acid from the bacterial cell comprises a genetic mutation which reduces or inhibits translation of the gene encoding the exporter, e.g., the leuE gene.

[0080] Moreover, the term “genetic modification that increases import of a branched chain amino acid into the bacterial cell” refers to a genetic modification that increases the uptake rate or increases the uptake quantity of a branched chain amino acid into the cytosol of the bacterial cell, as compared to the uptake rate or uptake quantity of the branched chain amino acid into the cytosol of a bacterial cell not having said modification, e.g., a wild-type bacterial cell. In some embodiments, an engineered bacterial cell having a genetic modification that increases import of a branched chain amino acid into the bacterial cell refers to a bacterial cell comprising heterologous gene sequence (native or non-native) encoding one or more importer(s) (transporter(s)) of a branched chain amino acid. In some embodiments, the genetically engineered bacteria comprising genetic modification that increases import of a branched chain amino acid into the bacterial cell comprise gene sequence(s) encoding a BCAA transporter or other amino acid transporter that transports one or more BCAA(s) into the bacterial cell, for example a transporter that is capable of transporting leucine, valine, and/or isoleucine into a bacterial cell. The transporter can be any transporter that assists or allows import of a BCAA into the cell. In certain embodiments, the BCAA transporter is a leucine transporter, e.g., a high-affinity leucine transporter, e.g., LivKHMGF. In certain embodiments, the engineered bacterial cell contains gene sequence of one or more of livK, livH, livM, livG, and livF genes. In certain embodiments, the BCAA transporter is a BCAA transporter, e.g., a low affinity BCAA transporter, e.g., BmQ. In certain embodiments, the engineered bacterial cell contains gene sequence encoding brnQ gene. In some embodiments, the engineered bacteria comprise more than one copy of gene sequence encoding a BCAA transporter. In some embodiments, the engineered bacteria comprise gene sequence(s) encoding more than one BCAA transporter, e.g., two or more different BCAA transporters.

[0081] As used herein, the term “transporter” is meant to refer to a mechanism, e.g., protein, proteins, or protein complex, for importing a molecule, e.g., amino acid, peptide (di-peptide, tri-peptide, polypeptide, etc.), toxin, metabolite, substrate, as well as other biomolecules into the microorganism from the extracellular milieu.

[0082] As used herein, the term “polypeptide of interest” or “polypeptides of interest”, “protein of interest”, “proteins of interest”, “payload”, “payloads” includes, but is not limited to, any or a plurality of any of the branched chain amino acid catabolism enzymes, and/or branched chain amino acid transporters, and/or branched chain amino acid binding proteins and/or branched chain amino acid exporters described herein. As used herein, the term “gene of interest” or “gene sequence of interest” includes any or a plurality of any of the gene(s) an/or gene sequence(s) and or gene cassette(s) encoding one or more branched chain amino acid catabolism enzymes, ranched chain amino acid transporters, branched chain amino acid binding proteins, and branched chain amino acid exporters described herein.

[0083] The term “branched chain amino acid” or “BCAA,” as used herein, refers to an amino acid which comprises a branched side chain. Leucine, isoleucine, and valine are naturally occurring amino acids comprising a branched side chain. However, non-naturally occurring, usual, and/or modified amino acids comprising a branched side chain are also encompassed by the term branched chain amino acid.

[0084] Conversion of a branched chain amino acid to its corresponding alpha-keto acid is the first step in branched chain amino acid catabolism and is reversible when catalyzed by a leucine dehydrogenase (leuDH) or a branched chain amino acid aminotransferase (ilvE), or irreversible when catalyzed by an amino acid oxidase (also referred as amino acid deaminase, e.g., L-AAD). As used herein, the terms “alpha-keto acid” or “α-keto acid” refers to the molecules which are produced after deamination of a branched chain amino acid, and include the naturally occurring alpha-keto acids: α-ketoisocaproic acid (KIC) (also known as 4-methyl-2-oxopentanoate), α-ketoisovaleric acid (KIV) (also known as 2-oxoisopentanoate), and α-keto-beta-methylvaleric acid (KMV) (also known as 3-methyl-2-oxopentanoate). However, non-naturally occurring, unusual, or modified alpha-keto acids are also encompassed by the term “alpha-keto acid.”

[0085] Conversion of a branched chain alpha-keto acid to its corresponding branched acyl-CoA derivative is the second step in branched chain amino acid catabolism and is irreversible. As used herein, the term “acyl-CoA derivative” refers to the molecules which are produced after dehydrogenation of a branched chain alpha-keto acid, and include the naturally occurring acyl-CoA derivatives, propionyl-CoA and acetyl-CoA. However, non-naturally occurring, unusual, or modified acyl-CoA derivatives are also encompassed by the term “acyl-CoA derivative.”

[0086] In an alternative BCAA catabolism pathway, known as the “Ehrlich pathway”, a branched chain alpha-keto acid is irreversibly decarboxylated to its corresponding branched chain amino acid-derived aldehyde. This irreversible catabolic conversion of a branched chain alpha-keto acid, e.g., alpha-keto acids α-ketoisocaproic acid (KIC), α-ketoisovaleric acid (KIV), or α-keto-beta-methylvaleric acid (KMV) to its corresponding branched chain amino acid-derived aldehyde, e.g., isovaleraldehyde, isobutyraldehyde, or 2-methylbutyraldehyde, is catalyzed by ketoacid decarboxylase (KivD). As used herein, the term “branched chain amino acid-derived aldehyde” refers to the molecules which are produced after decarboxylation of a branched chain alpha-keto acid, and include the naturally occurring aldehydes isovaleraldehyde, 2-methyl butyraldehyde, and isobutyraldehyde. However, non-naturally occurring, unusual, or modified aldehydes are also encompassed by the term “aldehyde.” BCAA-derived aldehydes can then be converted to alcohols (e.g., isopentanol, isobutanol, 2-methylbutanol) by an alcohol dehydrogenase, e.g., Adh2 or Ygh.D. Alternatively, BCAA-derived aldehydes can be converted to their respective carboxylic acids (e.g., isovalerate, isobutyrate, and 2-methylbutyrate) by an aldehyde dehydrogenase, e.g., PadA.

[0087] As used herein, the phrase “exogenous environmental condition” or “exogenous environment signal” refers to settings, circumstances, stimuli, or biological molecules under which a promoter described herein is directly or indirectly induced. The phrase “exogenous environmental conditions” is meant to refer to the environmental conditions external to the engineered microorganism, but endogenous or native to the host subject environment. Thus, “exogenous” and “endogenous” may be used interchangeably to refer to environmental conditions in which the environmental conditions are endogenous to a mammalian body, but external or exogenous to an intact microorganism cell. In some embodiments, the exogenous environmental conditions are specific to the gut of a mammal. In some embodiments, the exogenous environmental conditions are specific to the upper gastrointestinal tract of a mammal. In some embodiments, the exogenous environmental conditions are specific to the lower gastrointestinal tract of a mammal. In some embodiments, the exogenous environmental conditions are specific to the small intestine of a mammal. In some embodiments, the exogenous environmental conditions are low-oxygen, microaerobic, or anaerobic conditions, such as the environment of the mammalian gut. In some embodiments, exogenous environmental conditions are molecules or metabolites that are specific to the mammalian gut, e.g., propionate. In some embodiments, the exogenous environmental condition is a tissue-specific or disease-specific metabolite or molecule(s). In some embodiments, the exogenous environmental condition is specific to a branched chain amino acid catabolic enzyme disease, e.g., MSUD. In some embodiments, the exogenous environmental condition is a low-pH environment. In some embodiments, the genetically engineered microorganism of the disclosure comprises a pH-dependent promoter. In some embodiments, the genetically engineered microorganism of the disclosure comprise an oxygen level-dependent promoter. In some aspects, bacteria have evolved transcription factors that are capable of sensing oxygen levels. Different signaling pathways may be triggered by different oxygen levels and occur with different kinetics. An “oxygen level-dependent promoter” or “oxygen level-dependent regulatory region” refers to a nucleic acid sequence to which one or more oxygen level-sensing transcription factors is capable of binding, wherein the binding and/or activation of the corresponding transcription factor activates downstream gene expression.

[0088] Examples of oxygen level-dependent transcription factors include, but are not limited to, FNR (fumarate and nitrate reductase), ANR, and DNR. Corresponding FNR-responsive promoters, ANR (anaerobic nitrate respiration)-responsive promoters, and DNR (dissimilatory nitrate respiration regulator)-responsive promoters are known in the art (see, e.g., Castiglione et al., 2009; Eiglmeier et al., 1989; Galimand et al., 1991; Hasegawa et al., 1998; Hoeren et al., 1993; Salmon et al., 2003), and non-limiting examples are shown in Table 1.

[0089] In a non-limiting example, a promoter (PfnrS) was derived from the E. coli Nissle fumarate and nitrate reductase gene S (fnrS) that is known to be highly expressed under conditions of low or no environmental oxygen (Durand and Storz, 2010; Boysen et al, 2010). The PfnrS promoter is activated under anaerobic conditions by the global transcriptional regulator FNR that is naturally found in Nissle. Under anaerobic conditions, FNR forms a dimer and binds to specific sequences in the promoters of specific genes under its control, thereby activating their expression. However, under aerobic conditions, oxygen reacts with iron-sulfur clusters in FNR dimers and converts them to an inactive form. In this way, the PfnrS inducible promoter is adopted to modulate the expression of proteins or RNA. PfnrS is used interchangeably in this application as FNRS, fnrs, FNR, P-FNRS promoter and other such related designations to indicate the promoter PfnrS.

TABLE 1
Examples of transcription factors and
responsive genes and regulatory regions

| | Examples of responsive genes, promoters, |
|---|---|
| Transcription Factor | and/or regulatory regions: |
| FNR | nirB, ydfZ, pdhR, focA, ndH, hlyE, narK, |
| | narX, narG, yfiD, tdcD |
| ANR | arcDABC |
| DNR | norb, norC |

[0090] In some embodiments, the exogenous environmental conditions are the presence or absence of reactive oxygen species (ROS). In other embodiments, the exogenous environmental conditions are the presence or absence of reactive nitrogen species (RNS). In some embodiments, exogenous environmental conditions are biological molecules that are involved in the inflammatory response, for example, molecules present in an inflammatory disorder of the gut. In some embodiments, the exogenous environmental conditions or signals exist naturally or are naturally absent in the environment in which the recombinant bacterial cell resides. In some embodiments, the exogenous environmental conditions or signals are artificially created, for example, by the creation or removal of biological conditions and/or the administration or removal of biological molecules.

[0091] In some embodiments, the exogenous environmental condition(s) and/or signal(s) stimulates the activity of an inducible promoter. In some embodiments, the exogenous environmental condition(s) and/or signal(s) that serves to activate the inducible promoter is not naturally present within the gut of a mammal. In some embodiments, the inducible promoter is stimulated by a molecule or metabolite that is administered in combination with the pharmaceutical composition of the disclosure, for example, tetracycline, arabinose, or any biological molecule that serves to activate an inducible promoter. In some embodiments, the exogenous environmental condition(s) and/or signal(s) is added to culture media comprising a recombinant bacterial cell of the disclosure. In some embodiments, the exogenous environmental condition that serves to activate the inducible promoter is naturally present within the gut of a mammal (for example, low oxygen or anaerobic conditions, or biological molecules involved in an inflammatory response). In some embodiments, the loss of exposure to an exogenous environmental condition (for example, in vivo) inhibits the activity of an inducible promoter, as the exogenous environmental condition is not present to induce the promoter (for example, an aerobic environment outside the gut). “Gut” refers to the organs, glands, tracts, and systems that are responsible for the transfer and digestion of food, absorption of nutrients, and excretion of waste. In humans, the gut comprises the gastrointestinal (GI) tract, which starts at the mouth and ends at the anus, and additionally comprises the esophagus, stomach, small intestine, and large intestine. The gut also comprises accessory organs and glands, such as the spleen, liver, gallbladder, and pancreas. The upper gastrointestinal tract comprises the esophagus, stomach, and duodenum of the small intestine. The lower gastrointestinal tract comprises the remainder of the small intestine, i.e., the jejunum and ileum, and all of the large intestine, i.e., the cecum, colon, rectum, and anal canal. Bacteria can be found throughout the gut, e.g., in the gastrointestinal tract, and particularly in the intestines.

[0092] As used herein, the term “low oxygen” is meant to refer to a level, amount, or concentration of oxygen (O₂) that is lower than the level, amount, or concentration of oxygen that is present in the atmosphere (e.g., <21% O₂; <160 torr O₂)). Thus, the term “low oxygen condition or conditions” or “low oxygen environment” refers to conditions or environments containing lower levels of oxygen than are present in the atmosphere. In some embodiments, the term “low oxygen” is meant to refer to the level, amount, or concentration of oxygen (O₂) found in a mammalian gut, e.g., lumen, stomach, small intestine, duodenum, jejunum, ileum, large intestine, cecum, colon, distal sigmoid colon, rectum, and anal canal. In some embodiments, the term “low oxygen” is meant to refer to a level, amount, or concentration of O₂ that is 0-60 mmHg O₂ (0-60 torr 02) (e.g., 0, 1, 2, 3, 4, 5, 6, 7, 8, 9, 10, 11, 12, 13, 14, 15, 16, 17, 18, 19, 20, 21, 22, 23, 24, 25, 26, 27, 28, 29, 30, 31, 32, 33, 34, 35, 36, 37, 38, 39, 40, 41, 42, 43, 44, 45, 46, 47, 48, 49, 50, 51, 52, 53, 54, 55, 56, 57, 58, 59, and 60 mmHg 02), including any and all incremental fraction(s) thereof (e.g., 0.2 mmHg, 0.5 mmHg O₂, 0.75 mmHg O₂, 1.25 mmHg O₂, 2.175 mmHg O₂, 3.45 mmHg O₂, 3.75 mmHg O₂, 4.5 mmHg O₂, 6.8 mmHg O₂, 11.35 mmHg 02, 46.3 mmHg O₂, 58.75 mmHg, etc., which exemplary fractions are listed here for illustrative purposes and not meant to be limiting in any way). In some embodiments, “low oxygen” refers to about 60 mmHg O₂ or less (e.g., 0 to about 60 mmHg O₂). The term “low oxygen” may also refer to a range of O₂ levels, amounts, or concentrations between 0-60 mmHg O₂ (inclusive), e.g., 0-5 mmHg O₂, <1.5 mmHg O₂, 6-10 mmHg, <8 mmHg, 47-60 mmHg, etc. which listed exemplary ranges are listed here for illustrative purposes and not meant to be limiting in any way. See, for example, Albenberg et al., Gastroenterology, 147(5): 1055-1063 (2014); Bergofsky et al., J Clin. Invest., 41(11): 1971-1980 (1962); Crompton et al., J Exp. Biol., 43: 473-478 (1965); He et al., PNAS (USA), 96: 4586-4591 (1999); McKeown, Br. J. Radiol., 87:20130676 (2014) (doi: 10.1259/brj.20130676), each of which discusses the oxygen levels found in the mammalian gut of various species and each of which are incorporated by reference herewith in their entireties. In some embodiments, the term “low oxygen” is meant to refer to the level, amount, or concentration of oxygen (O₂) found in a mammalian organ or tissue other than the gut, e.g., urogenital tract, tumor tissue, etc. in which oxygen is present at a reduced level, e.g., at a hypoxic or anoxic level. In some embodiments, “low oxygen” is meant to refer to the level, amount, or concentration of oxygen (O₂) present in partially aerobic, semi aerobic, microaerobic, nanoaerobic, microoxic, hypoxic, anoxic, and/or anaerobic conditions. For example, Table 2 summarizes the amount of oxygen present in various organs and tissues. In some embodiments, the level, amount, or concentration of oxygen (O₂) is expressed as the amount of dissolved oxygen (“DO”) which refers to the level of free, non-compound oxygen (O₂) present in liquids and is typically reported in milligrams per liter (mg/L), parts per million (ppm; 1 mg/L=1 ppm), or in micromoles (umole) (1 umole O₂=0.022391 mg/L O₂). Fondriest Environmental, Inc., “Dissolved Oxygen”, Fundamentals of Environmental Measurements, 19 Nov. 2013. In some embodiments, the term “low oxygen” is meant to refer to a level, amount, or concentration of oxygen (O₂) that is about 6.0 mg/L DO or less, e.g., 6.0 mg/L, 5.0 mg/L, 4.0 mg/L, 3.0 mg/L, 2.0 mg/L, 1.0 mg/L, or 0 mg/L, and any fraction therein, e.g., 3.25 mg/L, 2.5 mg/L, 1.75 mg/L, 1.5 mg/L, 1.25 mg/L, 0.9 mg/L, 0.8 mg/L, 0.7 mg/L, 0.6 mg/L, 0.5 mg/L, 0.4 mg/L, 0.3 mg/L, 0.2 mg/L and 0.1 mg/L DO, which exemplary fractions are listed here for illustrative purposes and not meant to be limiting in any way. The level of oxygen in a liquid or solution may also be reported as a percentage of air saturation or as a percentage of oxygen saturation (the ratio of the concentration of dissolved oxygen (O₂) in the solution to the maximum amount of oxygen that will dissolve in the solution at a certain temperature, pressure, and salinity under stable equilibrium). Well-aerated solutions (e.g., solutions subjected to mixing and/or stirring) without oxygen producers or consumers are 100% air saturated. In some embodiments, the term “low oxygen” is meant to refer to 40% air saturation or less, e.g., 40%, 39%, 38%, 37%, 36%, 35%, 34%, 33%, 32%, 31%, 30%, 29%, 28%, 27%, 26%, 25%, 24%, 23%, 22%, 21%, 20%, 19%, 18%, 17%, 16%, 15%, 14%, 13%, 12%, 11%, 10%, 9%, 8%, 7%, 6%, 5%, 4%, 3%, 2%, 1%, and 0% air saturation, including any and all incremental fraction(s) thereof (e.g., 30.25%, 22.70%, 15.5%, 7.7%, 5.0%, 2.8%, 2.0%, 1.65%, 1.0%, 0.9%, 0.8%, 0.75%, 0.68%, 0.5%. 0.44%, 0.3%, 0.25%, 0.2%, 0.1%, 0.08%, 0.075%, 0.058%, 0.04%. 0.032%, 0.025%, 0.01%, etc.) and any range of air saturation levels between 0-40%, inclusive (e.g., 0-5%, 0.05-0.1%, 0.1-0.2%, 0.1-0.5%, 0.5-2.0%, 0-10%, 5-10%, 10-15%, 15-20%, 20-25%, 25-30%, etc.). The exemplary fractions and ranges listed here are for illustrative purposes and not meant to be limiting in any way. In some embodiments, the term “low oxygen” is meant to refer to 9% O₂ saturation or less, e.g., 9%, 8%, 7%, 6%, 5%, 4%, 3%, 2%, 1%, 0%, O₂ saturation, including any and all incremental fraction(s) thereof (e.g., 6.5%, 5.0%, 2.2%, 1.7%, 1.4%, 0.9%, 0.8%, 0.75%, 0.68%, 0.5%. 0.44%, 0.3%, 0.25%, 0.2%, 0.1%, 0.08%, 0.075%, 0.058%, 0.04%. 0.032%, 0.025%, 0.01%, etc.) and any range of O₂ saturation levels between 0-9%, inclusive (e.g., 0-5%, 0.05-0.1%, 0.1-0.2%, 0.1-0.5%, 0.5-2.0%, 0-8%, 5-7%, 0.3-4.2% O₂, etc.). The exemplary fractions and ranges listed here are for illustrative purposes and not meant to be limiting in any way.

TABLE 2

| Compartment | Oxygen Tension |
|---|---|
| stomach | ~60 torr (e.g., 58 +/− 15 torr) |
| duodenum and first | ~30 torr (e.g., 32 +/− 8 torr); ~20% oxygen in |
| part of jejunum | ambient air |
| Ileum (mid- small | ~10 torr; ~6% oxygen in ambient air (e.g., 11 +/− |
| intestine) | 3 torr) |
| Distal sigmoid colon | ~3 torr (e.g., 3 +/− 1 torr) |
| colon | <2 torr |
| Lumen of cecum | <1 torr |
| tumor | <32 torr (most tumors are <15 torr) |

[0093] “Microorganism” refers to an organism or microbe of microscopic, submicroscopic, or ultramicroscopic size that typically consists of a single cell. Examples of microorganisms include bacteria, viruses, parasites, fungi, certain algae, yeast, and protozoa. In some aspects, the microorganism is engineered (“engineered microorganism”) to produce one or more therapeutic molecules, e.g., lysosomal enzyme(s). In certain embodiments, the engineered microorganism is an engineered bacterium. In certain embodiments, the engineered microorganism is an engineered yeast or virus.

[0094] “Non-pathogenic bacteria” refer to bacteria that are not capable of causing disease or harmful responses in a host. In some embodiments, non-pathogenic bacteria are Gram-negative bacteria. In some embodiments, non-pathogenic bacteria are Gram-positive bacteria. In some embodiments, non-pathogenic bacteria do not contain lipopolysaccharides (LPS). In some embodiments, non-pathogenic bacteria are commensal bacteria. Examples of non-pathogenic bacteria include, but are not limited to certain strains belonging to the genus Bacillus, Bacteroides, Bifidobacterium, Brevibacteria, Clostridium, Enterococcus, Escherichia coli, Lactobacillus, Lactococcus, Saccharomyces, and Staphylococcus, e.g., Bacillus coagulans, Bacillus subtilis, Bacteroides fragilis, Bacteroides subtilis, Bacteroides thetaiotaomicron, Bifidobacterium bifidum, Bifidobacterium infantis, Bifidobacterium lactis, Bifidobacterium longum, Clostridium butyricum, Enterococcus faecium, Escherichia coli, Escherichia coli Nissle, Lactobacillus acidophilus, Lactobacillus bulgaricus, Lactobacillus casei, Lactobacillus johnsonii, Lactobacillus paracasei, Lactobacillus plantarum, Lactobacillus reuteri, Lactobacillus rhamnosus, Lactococcus lactis and Saccharomyces boulardii (Sonnenborn et al., 2009; Dinleyici et al., 2014; U.S. Pat. Nos. 6,835,376; 6,203,797; 5,589,168; 7,731,976). Non-pathogenic bacteria also include commensal bacteria, which are present in the indigenous microbiota of the gut. In one embodiment, the disclosure further includes non-pathogenic Saccharomyces, such as Saccharomyces boulardii. Naturally pathogenic bacteria may be genetically engineered to reduce or eliminate pathogenicity.

[0095] “Probiotic” is used to refer to live, non-pathogenic microorganisms, e.g., bacteria, which can confer health benefits to a host organism that contains an appropriate amount of the microorganism. In some embodiments, the host organism is a mammal. In some embodiments, the host organism is a human. In some embodiments, the probiotic bacteria are Gram-negative bacteria. In some embodiments, the probiotic bacteria are Gram-positive bacteria. Some species, strains, and/or subtypes of non-pathogenic bacteria are currently recognized as probiotic bacteria. Examples of probiotic bacteria include, but are not limited to, certain strains belonging to the genus Bifidobacteria, Escherichia Coli, Lactobacillus, and Saccharomyces e.g., Bifidobacterium bifidum, Enterococcus faecium, Escherichia coli strain Nissle, Lactobacillus acidophilus, Lactobacillus bulgaricus, Lactobacillus paracasei, and Lactobacillus plantarum, and Saccharomyces boulardii (Dinleyici et al., 2014; U.S. Pat. Nos. 5,589,168; 6,203,797; 6,835,376). The probiotic may be a variant or a mutant strain of bacterium (Arthur et al., 2012; Cuevas-Ramos et al., 2010; Olier et al., 2012; Nougayrede et al., 2006). Non-pathogenic bacteria may be genetically engineered to enhance or improve desired biological properties, e.g., survivability. Non-pathogenic bacteria may be genetically engineered to provide probiotic properties. Probiotic bacteria may be genetically engineered to enhance or improve probiotic properties.

[0096] As used herein, the term “auxotroph” or “auxotrophic” refers to an organism that requires a specific factor, e.g., an amino acid, a sugar, or other nutrient) to support its growth. An “auxotrophic modification” is a genetic modification that causes the organism to die in the absence of an exogenously added nutrient essential for survival or growth because it is unable to produce said nutrient. As used herein, the term “essential gene” refers to a gene which is necessary to for cell growth and/or survival. Essential genes are described in more detail infra and include, but are not limited to, DNA synthesis genes (such as thyA), cell wall synthesis genes (such as dapA), and amino acid genes (such as serA and metA).

[0097] As used herein, the terms “modulate” and “treat” and their cognates refer to an amelioration of a disease, disorder, and/or condition, or at least one discernible symptom thereof. In another embodiment, “modulate” and “treat” refer to an amelioration of at least one measurable physical parameter, not necessarily discernible by the patient. In another embodiment, “modulate” and “treat” refer to inhibiting the progression of a disease, disorder, and/or condition, either physically (e.g., stabilization of a discernible symptom), physiologically (e.g., stabilization of a physical parameter), or both. In another embodiment, “modulate” and “treat” refer to slowing the progression or reversing the progression of a disease, disorder, and/or condition. As used herein, “prevent” and its cognates refer to delaying the onset or reducing the risk of acquiring a given disease, disorder and/or condition or a symptom associated with such disease, disorder, and/or condition.

[0098] Those in need of treatment may include individuals already having a particular medical disease, as well as those at risk of having, or who may ultimately acquire the disease. The need for treatment is assessed, for example, by the presence of one or more risk factors associated with the development of a disease, the presence or progression of a disease, or likely receptiveness to treatment of a subject having the disease. Diseases associated with the catabolism of a branched chain amino acid, e.g., MSUD, may be caused by inborn genetic mutations for which there are no known cures. Diseases can also be secondary to other conditions, e.g., liver diseases. Treating diseases involving the catabolism of a branched chain amino acid, such as MSUD, may encompass reducing normal levels of branched chain amino acids, reducing excess levels of branched chain amino acids, or eliminating branched chain amino acids, e.g., leucine, and does not necessarily encompass the elimination of the underlying disease.

[0099] As used herein, the term “catabolism” refers to the breakdown of a molecule into a smaller unit. As used herein, the term “branched chain amino acid catabolism” refers to the conversion of a branched chain amino acid, such as leucine, isoleucine, or valine, into a corresponding metabolite, for example a corresponding alpha keto acid, acyl-CoA derivative, aldehyde, alcohol, or other metabolite, such as any of the BCAA metabolites disclosed herein; or the conversion of a branched chain alpha keto acid into its corresponding acyl-CoA derivative, aldehydes, alcohols or other metabolites, such as any of the BCAA metabolites disclosed herein. The “branched chain amino acid catabolism” refers to both native and non-native conversion of a branched chain amino acid, such as leucine, isoleucine, or valine, into a corresponding metabolite. Thus, the term additionally covers catabolism of BCAA that may not occur in nature and is artificially induced as a result of genetic engineering. In one embodiment, “abnormal catabolism” refers to a decrease in the rate or the level of conversion of a branched chain amino acid or its corresponding alpha-keto acid to a corresponding metabolite, leading to the accumulation of the branched chain amino acid, accumulation of the branched chain alpha-keto acid, and/or accumulation of a BCAA metabolite that is toxic or that accumulates to a toxic level in a subject. In one embodiment, the branched chain amino acid, branched chain alpha-keto acid, or other metabolite thereof, accumulates to a toxic level in the blood or the brain of a subject, leading to the development of a disease or disorder associated with the abnormal catabolism of the branched chain amino acid in the subject. In one embodiment, “abnormal leucine catabolism” refers to a level of greater than 4 mg/dL of leucine in the plasma of a subject. In another embodiment, “normal leucine catabolism” refers to a level of less than 4 mg/dL of leucine in the plasma of a subject.

[0100] As used herein, the term “disorder involving the abnormal catabolism of a branched amino acid” or “disease involving the abnormal catabolism of a branched amino acid” or “branched chain amino acid disease” or “disease associated with excess branched chain amino acid” refers to a disease or disorder wherein the catabolism of a branched chain amino acid or a branched chain alpha-keto acid is abnormal. Such diseases are genetic disorders that result from deficiency in at least one of the enzymes required to catabolize a branched chain amino acid, e.g., leucine, isoleucine, or valine. As a result, individuals suffering from branched chain amino acid disease have accumulated branched chain amino acids in their cells and tissues. Examples of branched chain amino acid diseases include, but are not limited to, MSUD, isovaleric acidemia, 3-MCC deficiency, 3-methylglutaconyl-CoA hydrolase deficiency, HMG-CoA lysate deficiency, Acetyl CoA carboxylase deficiency, malonylCoA decarboxylase deficiency, short branched chain acyl-CoA dehydrogenase, 2-methyl-3-hydroxybutyric acidemia, beta-ketothiolase deficiency, isobutyl-CoA dehydrogenase deficiency, HIBCH deficiency, 3-hydroxyisobutyric aciduria, proprionic acidemis, methylmalonic acidemia, as well as those diseases resulting from mTor activation, including but not limited to cancer, obesity, type 2 diabetes, neurodegeneration, autism, Alzheimer's disease, Lymphangioleiomyomatosis (LAM), transplant rejection, glycogen storage disease, obesity, tuberous sclerosis, hypertension, cardiovascular disease, hypothalamic activation, musculoskeletal disease, Parkinson's disease, Huntington's disease, psoriasis, rheumatoid arthritis, lupus, multiple sclerosis, Leigh's syndrome, and Friedrich's ataxia. In one embodiment, a “disease or disorder involving the catabolism of a branched chain amino acid” is a metabolic disease or disorder involving the abnormal catabolism of a branched chain amino acid. In another embodiment, a “disease or disorder involving the catabolism of a branched chain amino acid” is a disease or disorder caused by the activation of mTor. In one embodiment, the activation of mTor is abnormal.

[0101] In one embodiment, “abnormal catabolism” refers to a decrease in the rate or the level of conversion of the branched chain amino acid or its alpha-keto acid counterpart, leading to the accumulation of the branched chain amino acid or alpha-keto acid in a subject. In one embodiment, accumulation of the branched chain amino acid in the blood or the brain of a subject becomes toxic and leads to the development of a disease or disorder associated with the abnormal catabolism of the branched chain amino acid in the subject.

[0102] As used herein, the term “disease caused by the activation of mTor” or “disorder caused by the activation of mTor” refers to a disease or a disorder wherein the levels of branched chain amino acid may be normal, and wherein the branched chain amino acid causes the activation of mTor at a level higher than the normal level of mTor activity. In another embodiment, the subject having a disorder caused by the activation of mTor may have higher levels of a branched chain amino acid than normal. Diseases caused by the activation of mTor are known in the art. See, for example, Laplante and Sabatini, Cell, 149(2):74-293, 2012. As used herein, the term “disease caused by the activation of mTor” includes cancer, obesity, type 2 diabetes, neurodegeneration, autism, Alzheimer's disease, Lymphangioleiomyomatosis (LAM), transplant rejection, glycogen storage disease, obesity, tuberous sclerosis, hypertension, cardiovascular disease, hypothalamic activation, musculoskeletal disease, Parkinson's disease, Huntington's disease, psoriasis, rheumatoid arthritis, lupus, multiple sclerosis, Leigh's syndrome, and Friedrich's ataxia. In one embodiment, the subject has normal levels of a branched chain amino acid, such as leucine, before administration of the engineered bacteria of the present disclosure. In another embodiment, the subject has decreased levels of the branched chain amino acid after the administration of the engineered bacteria of the present disclosure, thereby decreasing the levels of mTor or the activity of mTor, thereby treating the disorder in the subject. In one embodiment, the pharmaceutical composition disclosed herein decreases the activity of mTor by at least about 2-fold, 3-fold, 4-fold, or 5-fold in the subject.

[0103] As used herein, the term “anabolism” refers the conversion of a branched chain alpha-keto acid or an acyl-CoA derivative or other metabolite into its corresponding branched chain amino acid, such as leucine, isoleucine, or valine or alpha-keto acid, respectively.

[0104] As used herein a “pharmaceutical composition” refers to a preparation of genetically engineered microorganism of the disclosure, e.g., genetically engineered bacteria yeast or virus, with other components such as a physiologically suitable carrier and/or excipient.

[0105] The phrases “physiologically acceptable carrier” and “pharmaceutically acceptable carrier” which may be used interchangeably refer to a carrier or a diluent that does not cause significant irritation to an organism and does not abrogate the biological activity and properties of the administered bacterial or viral compound. An adjuvant is included under these phrases.

[0106] The term “excipient” refers to an inert substance added to a pharmaceutical composition to further facilitate administration of an active ingredient. Examples include, but are not limited to, calcium bicarbonate, sodium bicarbonate calcium phosphate, various sugars and types of starch, cellulose derivatives, gelatin, vegetable oils, polyethylene glycols, and surfactants, including, for example, polysorbate 20.

[0107] The terms “therapeutically effective dose” and “therapeutically effective amount” are used to refer to an amount of a compound that results in prevention, delay of onset of symptoms, or amelioration of symptoms of a condition, e.g., lysosomal storage disease (LSD). A therapeutically effective amount may, for example, be sufficient to treat, prevent, reduce the severity, delay the onset, and/or reduce the risk of occurrence of one or more symptoms of a disorder associated with lysosomal storage disease. A therapeutically effective amount, as well as a therapeutically effective frequency of administration, can be determined by methods known in the art and discussed below.

[0108] As used herein, the term “bacteriostatic” or “cytostatic” refers to a molecule or protein which is capable of arresting, retarding, or inhibiting the growth, division, multiplication or replication of recombinant bacterial cell of the disclosure.

[0109] As used herein, the term “bactericidal” refers to a molecule or protein which is capable of killing the recombinant bacterial cell of the disclosure.

[0110] As used herein, the term “toxin” refers to a protein, enzyme, or polypeptide fragment thereof, or other molecule which is capable of arresting, retarding, or inhibiting the growth, division, multiplication or replication of the recombinant bacterial cell of the disclosure, or which is capable of killing the recombinant bacterial cell of the disclosure. The term “toxin” is intended to include bacteriostatic proteins and bactericidal proteins. The term “toxin” is intended to include, but not limited to, lytic proteins, bacteriocins (e.g., microcins and colicins), gyrase inhibitors, polymerase inhibitors, transcription inhibitors, translation inhibitors, DNases, and RNases. The term “anti-toxin” or “antitoxin,” as used herein, refers to a protein or enzyme which is capable of inhibiting the activity of a toxin. The term anti-toxin is intended to include, but not limited to, immunity modulators, and inhibitors of toxin expression. Examples of toxins and antitoxins are known in the art and described in more detail infra.

[0111] As used herein, the term “branched chain amino acid catabolic or catabolism enzyme” or “BCAA catabolic or catabolism enzyme” or “branched chain or BCAA amino acid metabolic enzyme” refers to any enzyme that is capable of metabolizing a branched chain amino acid or capable of reducing accumulated branched chain amino acid or that can lessen, ameliorate, or prevent one or more branched chain amino acid diseases or disease symptoms. Examples of branched chain amino acid metabolic enzymes include, but are not limited to, leucine dehydrogenase (e.g., LeuDH), branched chain amino acid aminotransferase (e.g., IlvE), branched chain α-ketoacid dehydrogenase (e.g., KivD), L-Amino acid deaminase (e.g., L-AAD), alcohol dehydrogenase (e.g., Adh2, YqhD)), and aldehyde dehydrogenase (e.g., PadA), and any other enzymes that catabolizes BCAA. Functional deficiencies in these proteins result in the accumulation of BCAA or its corresponding α-keto acid in cells and tissues. BCAA metabolic enzymes of the present disclosure include both wild-type or modified BCAA metabolic enzymes and can be produced using recombinant and synthetic methods or purified from nature sources. BCAA metabolic enzymes include full-length polypeptides and functional fragments thereof, as well as homologs and variants thereof. BCAA metabolic enzymes include polypeptides that have been modified from the wild-type sequence, including, for example, polypeptides having one or more amino acid deletions, insertions, and/or substitutions and may include, for example, fusion polypeptides and polypeptides having additional sequence, e.g., regulatory peptide sequence, linker peptide sequence, and other peptide sequence.

[0112] As used herein, “payload” refers to one or more molecules of interest to be produced by a genetically engineered microorganism, such as a bacterium, yeast, or a virus. In some embodiments, the payload is a therapeutic payload, e.g., a branched chain amino acid catabolic enzyme or a BCAA transporter polypeptide. In some embodiments, the payload is a regulatory molecule, e.g., a transcriptional regulator such as FNR. In some embodiments, the payload comprises a regulatory element, such as a promoter or a repressor. In some embodiments, the payload comprises an inducible promoter, such as from FNRS. In some embodiments, the payload comprises a repressor element, such as a kill switch. In some embodiments, the payload comprises an antibiotic resistance gene or genes. In some embodiments, the payload is encoded by a gene, multiple genes, gene cassette, or an operon. In alternate embodiments, the payload is produced by a biosynthetic or biochemical pathway, wherein the biosynthetic or biochemical pathway may optionally be endogenous to the microorganism. In alternate embodiments, the payload is produced by a biosynthetic or biochemical pathway, wherein the biosynthetic or biochemical pathway is not endogenous to the microorganism. In some embodiments, the genetically engineered microorganism comprises two or more payloads.

[0113] As used herein, the term “conventional branched chain amino acid or BCAA disease treatment” or “conventional branched chain amino acid or BCAA disease therapy” refers to treatment or therapy that is currently accepted, considered current standard of care, and/or used by most healthcare professionals for treating a disease or disorder associated with BCAA. It is different from alternative or complementary therapies, which are not as widely used.

[0114] As used herein, the term “polypeptide” includes “polypeptide” as well as “polypeptides,” and refers to a molecule composed of amino acid monomers linearly linked by amide bonds (i.e., peptide bonds). The term “polypeptide” refers to any chain or chains of two or more amino acids, and does not refer to a specific length of the product. Thus, “peptides,” “dipeptides,” “tripeptides, “oligopeptides,” “protein,” “amino acid chain,” or any other term used to refer to a chain or chains of two or more amino acids, are included within the definition of “polypeptide,” and the term “polypeptide” may be used instead of, or interchangeably with any of these terms. The term “polypeptide” is also intended to refer to the products of post-expression modifications of the polypeptide, including but not limited to glycosylation, acetylation, phosphorylation, amidation, derivatization, proteolytic cleavage, or modification by non-naturally occurring amino acids. A polypeptide may be derived from a natural biological source or produced by recombinant technology. In other embodiments, the polypeptide is produced by the genetically engineered bacteria, yeast, or virus of the current invention. A polypeptide of the invention may be of a size of about 3 or more, 5 or more, 10 or more, 20 or more, 25 or more, 50 or more, 75 or more, 100 or more, 200 or more, 500 or more, 1,000 or more, or 2,000 or more amino acids. Polypeptides may have a defined three-dimensional structure, although they do not necessarily have such structure. Polypeptides with a defined three-dimensional structure are referred to as folded, and polypeptides, which do not possess a defined three-dimensional structure, but rather can adopt a large number of different conformations, are referred to as unfolded. The term “peptide” or “polypeptide” may refer to an amino acid sequence that corresponds to a protein or a portion of a protein or may refer to an amino acid sequence that corresponds with non-protein sequence, e.g., a sequence selected from a regulatory peptide sequence, leader peptide sequence, signal peptide sequence, linker peptide sequence, and other peptide sequence.

[0115] An “isolated” polypeptide or a fragment, variant, or derivative thereof refers to a polypeptide that is not in its natural milieu. No particular level of purification is required. Recombinantly produced polypeptides and proteins expressed in host cells, including but not limited to bacterial or mammalian cells, are considered isolated for purposed of the invention, as are native or recombinant polypeptides which have been separated, fractionated, or partially or substantially purified by any suitable technique. Recombinant peptides, polypeptides or proteins refer to peptides, polypeptides or proteins produced by recombinant DNA techniques, i.e. produced from cells, microbial or mammalian, transformed by an exogenous recombinant DNA expression construct encoding the polypeptide. Proteins or peptides expressed in most bacterial cultures will typically be free of glycan. Fragments, derivatives, analogs or variants of the foregoing polypeptides, and any combination thereof are also included as polypeptides. The terms “fragment,” “variant,” “derivative” and “analog” include polypeptides having an amino acid sequence sufficiently similar to the amino acid sequence of the original peptide and include any polypeptides, which retain at least one or more properties of the corresponding original polypeptide. Fragments of polypeptides of the present invention include proteolytic fragments, as well as deletion fragments. Fragments also include specific antibody or bioactive fragments or immunologically active fragments derived from any polypeptides described herein. Variants may occur naturally or be non-naturally occurring. Non-naturally occurring variants may be produced using mutagenesis methods known in the art. Variant polypeptides may comprise conservative or non-conservative amino acid substitutions, deletions or additions.

[0116] Polypeptides also include fusion proteins. As used herein, the term “variant” includes a fusion protein, which comprises a sequence of the original peptide or sufficiently similar to the original peptide. As used herein, the term “fusion protein” refers to a chimeric protein comprising amino acid sequences of two or more different proteins. Typically, fusion proteins result from well known in vitro recombination techniques. Fusion proteins may have a similar structural function (but not necessarily to the same extent), and/or similar regulatory function (but not necessarily to the same extent), and/or similar biochemical function (but not necessarily to the same extent) and/or immunological activity (but not necessarily to the same extent) as the individual original proteins which are the components of the fusion proteins. “Derivatives” include but are not limited to peptides, which contain one or more naturally occurring amino acid derivatives of the twenty standard amino acids. “Similarity” between two peptides is determined by comparing the amino acid sequence of one peptide to the sequence of a second peptide. An amino acid of one peptide is similar to the corresponding amino acid of a second peptide if it is identical or a conservative amino acid substitution. Conservative substitutions include those described in Dayhoff, M. O., ed., The Atlas of Protein Sequence and Structure 5, National Biomedical Research Foundation, Washington, D.C. (1978), and in Argos, EMBO J. 8 (1989), 779-785. For example, amino acids belonging to one of the following groups represent conservative changes or substitutions: Ala, Pro, Gly, Gln, Asn, Ser, Thr, Cys, Ser, Tyr, Thr, Val, Ile, Leu, Met, Ala, Phe, Lys, Arg, His, Phe, Tyr, Trp, His, Asp, and Glu.

[0117] As used herein, the term “sufficiently similar” means a first amino acid sequence that contains a sufficient or minimum number of identical or equivalent amino acid residues relative to a second amino acid sequence such that the first and second amino acid sequences have a common structural domain and/or common functional activity. For example, amino acid sequences that comprise a common structural domain that is at least about 45%, at least about 50%, at least about 55%, at least about 60%, at least about 65%, at least about 70%, at least about 75%, at least about 80%, at least about 85%, at least about 90%, at least about 91%, at least about 92%, at least about 93%, at least about 94%, at least about 95%, at least about 96%, at least about 97%, at least about 98%, at least about 99%, or at least about 100%, identical are defined herein as sufficiently similar. Preferably, variants will be sufficiently similar to the amino acid sequence of the peptides of the invention. Such variants generally retain the functional activity of the peptides of the present invention. Variants include peptides that differ in amino acid sequence from the native and wild-type peptide, respectively, by way of one or more amino acid deletion(s), addition(s), and/or substitution(s). These may be naturally occurring variants as well as artificially designed ones.

[0118] As used herein the term “linker”, “linker peptide” or “peptide linkers” or “linker” refers to synthetic or non-native or non-naturally-occurring amino acid sequences that connect or link two polypeptide sequences, e.g., that link two polypeptide domains. As used herein the term “synthetic” refers to amino acid sequences that are not naturally occurring. Exemplary linkers are described herein. Additional exemplary linkers are provided in US 20140079701, the contents of which are herein incorporated by reference in its entirety.

[0119] As used herein the term “codon-optimized” refers to the modification of codons in the gene or coding regions of a nucleic acid molecule to reflect the typical codon usage of the host organism without altering the polypeptide encoded by the nucleic acid molecule. Such optimization includes replacing at least one, or more than one, or a significant number, of codons with one or more codons that are more frequently used in the genes of the host organism. A “codon-optimized sequence” refers to a sequence, which was modified from an existing coding sequence, or designed, for example, to improve translation in an expression host cell or organism of a transcript RNA molecule transcribed from the coding sequence, or to improve transcription of a coding sequence. Codon optimization includes, but is not limited to, processes including selecting codons for the coding sequence to suit the codon preference of the expression host organism. Many organisms display a bias or preference for use of particular codons to code for insertion of a particular amino acid in a growing polypeptide chain. Codon preference or codon bias, differences in codon usage between organisms, is allowed by the degeneracy of the genetic code, and is well documented among many organisms. Codon bias often correlates with the efficiency of translation of messenger RNA (mRNA), which is in turn believed to be dependent on, inter alia, the properties of the codons being translated and the availability of particular transfer RNA (tRNA) molecules. The predominance of selected tRNAs in a cell is generally a reflection of the codons used most frequently in peptide synthesis. Accordingly, genes can be tailored for optimal gene expression in a given organism based on codon optimization.

[0120] As used herein, the terms “secretion system” or “secretion protein” refers to a native or non-native secretion mechanism capable of secreting or exporting a biomolecule, e.g., polypeptide from the microbial, e.g., bacterial cytoplasm. The secretion system may comprise a single protein or may comprise two or more proteins assembled in a complex e.g. HlyBD. Non-limiting examples of secretion systems for gram negative bacteria include the modified type III flagellar, type I (e.g., hemolysin secretion system), type II, type IV, type V, type VI, and type VII secretion systems, resistance-nodulation-division (RND) multi-drug efflux pumps, various single membrane secretion systems. Non-liming examples of secretion systems for gram positive bacteria include Sec and TAT secretion systems. In some embodiments, the polypeptide to be secreted include a “secretion tag” of either RNA or peptide origin to direct the polypeptide to specific secretion systems. In some embodiments, the secretion system is able to remove this tag before secreting the polypeptide from the engineered bacteria. For example, in Type V auto-secretion-mediated secretion the N-terminal peptide secretion tag is removed upon translocation of the “passenger” peptide from the cytoplasm into the periplasmic compartment by the native Sec system. Further, once the auto-secretor is translocated across the outer membrane the C-terminal secretion tag can be removed by either an autocatalytic or protease-catalyzed e.g., OmpT cleavage thereby releasing the lysosomal enzyme(s) into the extracellular milieu. In some embodiments, the secretion system involves the generation of a “leaky” or de-stabilized outer membrane, which may be accomplished by deleting or mutagenizing genes responsible for tethering the outer membrane to the rigid peptidoglycan skeleton, including for example, lpp, ompC, ompA, ompF, tolA, tolB, pal, degS, degP, and nlpl. Lpp functions as the primary ‘staple’ of the bacterial cell wall to the peptidoglycan. TolA-PAL and OmpA complexes function similarly to Lpp and are other deletion targets to generate a leaky phenotype. Additionally, leaky phenotypes have been observed when periplasmic proteases, such as degS, degP or nipI, are deactivated. Thus, in some embodiments, the engineered bacteria have one or more deleted or mutated membrane genes, e.g., selected from lpp, ompA, ompA, ompF, tolA, tolB, and pal genes. In some embodiments, the engineered bacteria have one or more deleted or mutated periplasmic protease genes, e.g., selected from degS, degP, and nlpl. In some embodiments, the engineered bacteria have one or more deleted or mutated gene(s), selected from lpp, ompA, ompA, ompF, tolA, tolB, pal, degS, degP, and nlpl genes.

[0121] The articles “a” and “an,” as used herein, should be understood to mean “at least one,” unless clearly indicated to the contrary.

[0122] The phrase “and/or,” when used between elements in a list, is intended to mean either (1) that only a single listed element is present, or (2) that more than one element of the list is present. For example, “A, B, and/or C” indicates that the selection may be A alone; B alone; C alone; A and B; A and C; B and C; or A, B, and C. The phrase “and/or” may be used interchangeably with “at least one of” or “one or more of” the elements in a list.

[0123] Ranges provided herein are understood to be shorthand for all of the values within the range. For example, a range of 1 to 50 is understood to include any number, combination of numbers, or sub-range from the group consisting 1, 2, 3, 4, 5, 6, 7, 8, 9, 10, 11, 12, 13, 14, 15, 16, 17, 18, 19, 20, 21, 22, 23, 24, 25, 26, 27, 28, 29, 30, 31, 32, 33, 34, 35, 36, 37, 38, 39, 40, 41, 42, 43, 44, 45, 46, 47, 48, 49, or 50.

[0124] Recombinant Bacteria

[0125] The genetically engineered microorganisms, or programmed microorganisms, such as genetically engineered bacteria, of the disclosure are capable of producing one or more enzymes for metabolizing a branched amino acid and/or a metabolite thereof. In some aspects, the disclosure provides a bacterial cell that comprises one or more optimized heterologous gene sequence(s) encoding a branched chain amino acid catabolic enzyme or other protein that results in a decrease in BCAA levels, e.g., leucine levels.

[0126] In certain embodiments, the genetically engineered bacteria are obligate anaerobic bacteria. In certain embodiments, the genetically engineered bacteria are facultative anaerobic bacteria. In certain embodiments, the genetically engineered bacteria are aerobic bacteria. In some embodiments, the genetically engineered bacteria are Gram-positive bacteria. In some embodiments, the genetically engineered bacteria are Gram-positive bacteria and lack LPS. In some embodiments, the genetically engineered bacteria are Gram-negative bacteria. In some embodiments, the genetically engineered bacteria are Gram-positive and obligate anaerobic bacteria. In some embodiments, the genetically engineered bacteria are Gram-positive and facultative anaerobic bacteria. In some embodiments, the genetically engineered bacteria are non-pathogenic bacteria. In some embodiments, the genetically engineered bacteria are commensal bacteria. In some embodiments, the genetically engineered bacteria are probiotic bacteria. In some embodiments, the genetically engineered bacteria are naturally pathogenic bacteria that are modified or mutated to reduce or eliminate pathogenicity. Exemplary bacteria include, but are not limited to, Bacillus, Bacteroides, Bifidobacterium, Brevibacteria, Caulobacter, Clostridium, Enterococcus, Escherichia coli, Lactobacillus, Lactococcus, Listeria, Mycobacterium, Saccharomyces, Salmonella, Staphylococcus, Streptococcus, Vibrio, Bacillus coagulans, Bacillus subtilis, Bacteroides fragilis, Bacteroides subtilis, Bacteroides thetaiotaomicron, Bifidobacterium adolescentis, Bifidobacterium bifidum, Bifidobacterium breve UCC2003, Bifidobacterium infantis, Bifidobacterium lactis, Bifidobacterium longum, Clostridium acetobutylicum, Clostridium butyricum, Clostridium butyricum M-55, Clostridium cochlearum, Clostridium felsineum, Clostridium histolyticum, Clostridium multifermentans, Clostridium novyi-NT, Clostridium paraputrificum, Clostridium pasteureanum, Clostridium pectinovorum, Clostridium perfringens, Clostridium roseum, Clostridium sporogenes, Clostridium tertium, Clostridium tetani, Clostridium tyrobutyricum, Corynebacterium parvum, Escherichia coli MG1655, Escherichia coli Nissle 1917, Listeria monocytogenes, Mycobacterium bovis, Salmonella choleraesuis, Salmonella typhimurium, and Vibrio cholera. In certain embodiments, the genetically engineered bacteria are selected from the group consisting of Enterococcus faecium, Lactobacillus acidophilus, Lactobacillus bulgaricus, Lactobacillus casei, Lactobacillus johnsonii, Lactobacillus paracasei, Lactobacillus plantarum, Lactobacillus reuteri, Lactobacillus rhamnosus, Lactococcus lactis, and Saccharomyces boulardii. In certain embodiments, the genetically engineered bacteria are selected from Bacteroides fragilis, Bacteroides thetaiotaomicron, Bacteroides subtilis, Bifidobacterium bifidum, Bifidobacterium infantis, Bifidobacterium lactis, Clostridium butyricum, Escherichia coli, Escherichia coli Nissle, Lactobacillus acidophilus, Lactobacillus plantarum, Lactobacillus reuteri, and Lactococcus lactis bacterial cell. In one embodiment, the bacterial cell is a Bacteroides fragilis bacterial cell. In one embodiment, the bacterial cell is a Bacteroides thetaiotaomicron bacterial cell. In one embodiment, the bacterial cell is a Bacteroides subtilis bacterial cell. In one embodiment, the bacterial cell is a Bifidobacterium bifidum bacterial cell. In one embodiment, the bacterial cell is a Bifidobacterium infantis bacterial cell. In one embodiment, the bacterial cell is a Bifidobacterium lactis bacterial cell. In one embodiment, the bacterial cell is a Clostridium butyricum bacterial cell. In one embodiment, the bacterial cell is an Escherichia coli bacterial cell. In one embodiment, the bacterial cell is a Lactobacillus acidophilus bacterial cell. In one embodiment, the bacterial cell is a Lactobacillus plantarum bacterial cell. In one embodiment, the bacterial cell is a Lactobacillus reuteri bacterial cell. In one embodiment, the bacterial cell is a Lactococcus lactis bacterial cell.

[0127] In some embodiments, the genetically engineered bacteria are Escherichia coli strain Nissle 1917 (E. coli Nissle), a Gram-negative bacterium of the Enterobacteriaceae family that has evolved into one of the best characterized probiotics (Ukena et al., 2007). The strain is characterized by its complete harmlessness (Schultz, 2008), and has GRAS (generally recognized as safe) status (Reister et al., 2014, emphasis added). Genomic sequencing confirmed that E. coli Nissle lacks prominent virulence factors (e.g., E. coli α-hemolysin, P-fimbrial adhesins) (Schultz, 2008). In addition, it has been shown that E. coli Nissle does not carry pathogenic adhesion factors, does not produce any enterotoxins or cytotoxins, is not invasive, and not uropathogenic (Sonnenborn et al., 2009). As early as in 1917, E. coli Nissle was packaged into medicinal capsules, called Mutaflor, for therapeutic use. E. coli Nissle has since been used to treat ulcerative colitis in humans in vivo (Rembacken et al., 1999), to treat inflammatory bowel disease, Crohn's disease, and pouchitis in humans in vivo (Schultz, 2008), and to inhibit enteroinvasive Salmonella, Legionella, Yersinia, and Shigella in vitro (Altenhoefer et al., 2004). It is commonly accepted that E. coli Nissle's therapeutic efficacy and safety have convincingly been proven (Ukena et al., 2007).

[0128] One of ordinary skill in the art would appreciate that the genetic modifications disclosed herein may be adapted for other species, strains, and subtypes of bacteria. Furthermore, genes from one or more different species can be introduced into one another, e.g., the kivD gene from Lactococcus lactis can be expressed in Escherichia coli. In one embodiment, the recombinant bacterial cell does not colonize the subject having the disorder. Unmodified E. coli Nissle and the genetically engineered bacteria of the invention may be destroyed, e.g., by defense factors in the gut or blood serum (Sonnenborn et al., 2009). In some embodiments, the residence time is calculated for a human subject. In some embodiments, residence time in vivo is calculated for the genetically engineered bacteria of the invention.

[0129] In some embodiments, the bacterial cell is a genetically engineered bacterial cell. In another embodiment, the bacterial cell is a recombinant bacterial cell. In some embodiments, the disclosure comprises a colony of bacterial cells disclosed herein.

[0130] In another aspect, the disclosure provides a recombinant bacterial culture which comprises bacterial cells disclosed herein. In one aspect, the disclosure provides a recombinant bacterial culture which reduces levels of a branched chain amino acid, e.g., leucine, in the media of the culture. In one embodiment, the levels of the branched chain amino acid, e.g., leucine, are reduced by about 50%, about 75%, or about 100% in the media of the cell culture. In another embodiment, the levels of the branched chain amino acid, e.g., leucine, are reduced by about two-fold, three-fold, four-fold, five-fold, six-fold, seven-fold, eight-fold, nine-fold, or ten-fold in the media of the cell culture. In one embodiment, the levels of the branched chain amino acid, e.g., leucine, are reduced below the limit of detection in the media of the cell culture.

[0131] In some embodiments of the above described genetically engineered bacteria, the gene encoding a branched chain amino acid catabolism enzyme is present on a plasmid in the bacterium and operatively linked on the plasmid to a promoter that is induced under low-oxygen or anaerobic conditions, such as any of the promoters disclosed herein. In other embodiments, the gene encoding a branched chain amino acid catabolism enzyme is present in the bacterial chromosome and is operatively linked in the chromosome to the promoter that is induced under low-oxygen or anaerobic conditions, such as any of the promoters disclosed herein. In some embodiments of the above described genetically engineered bacteria, the gene encoding a branched chain amino acid catabolic enzyme is present on a plasmid in the bacterium and operatively linked on the plasmid to the promoter that is induced under inflammatory conditions, such as any of the promoters disclosed herein. In other embodiments, the gene encoding a branched chain amino acid catabolic enzyme is present in the bacterial chromosome and is operatively linked in the chromosome to the promoter that is induced under inflammatory conditions, such as any of the promoters disclosed herein.

[0132] In some embodiments, the genetically engineered bacteria comprising gene sequence encoding a branched chain amino acid catabolic enzyme is an auxotroph. In one embodiment, the genetically engineered bacteria is an auxotroph selected from a cysE, glnA, ilvD, leuB, lysA, serA, metA, glyA, hisB, ilvA, pheA, proA, thrC, trpC, tyrA, thyA, uraA, dapA, dapB, dapD, dapE, dapF, flhD, metB, metC, proAB, and thi1 auxotroph. In some embodiments, the engineered bacteria have more than one auxotrophy, for example, they may be a ΔthyA and ΔdapA auxotroph. In some embodiments, the genetically engineered bacteria comprising gene sequence encoding a branched chain amino acid catabolic enzyme lacks functional ilvC gene sequence, e.g., is a ilvC auxotroph. IlvC encodes keto acid reductoisomerase, which enzyme is required for BCAA synthesis. Knock out of ilvC creates an auxotroph and requires the bacterial cell to import isoleucine and valine to survive.

[0133] In some embodiments, the genetically engineered bacteria comprising gene sequence encoding a branched chain amino acid catabolism enzyme further comprise gene sequence(s) encoding a BCAA transporter or other amino acid transporter that transports one or more BCAA(s) into the bacterial cell, for example a transporter that is capable of transporting leucine, valine, and/or isoleucine into a bacterial cell. In certain embodiments, the BCAA transporter is a leucine transporter, e.g., a high-affinity leucine transporter. In certain embodiments, the bacterial cell contains livK, livH, livM, livG, and livF genes. In certain embodiments, the BCAA transporter is a BCAA transporter, e.g., a low affinity BCAA transporter. In certain embodiments, the bacterial cell contains gene sequence encoding brnQ gene.

[0134] In some embodiments, the genetically engineered bacteria comprising gene sequence encoding a branched chain amino acid catabolism enzyme further comprise gene sequence(s) encoding a secretion protein or protein complex for secreting a biomolecule, such as any of the secretion systems disclosed herein.

[0135] In some embodiments, the genetically engineered bacteria comprising gene sequence encoding a branched chain amino acid catabolism enzyme further comprise gene sequence(s) encoding one or more antibiotic gene(s), such as any of the antibiotic genes disclosed herein.

[0136] In some embodiments, the genetically engineered bacteria comprising a branched chain amino acid catabolism enzyme further comprise a kill-switch circuit, such as any of the kill-switch circuits provided herein. For example, in some embodiments, the genetically engineered bacteria further comprise one or more genes encoding one or more recombinase(s) under the control of an inducible promoter, and an inverted toxin sequence. In some embodiments, the genetically engineered bacteria further comprise one or more genes encoding an antitoxin. In some embodiments, the engineered bacteria further comprise one or more genes encoding one or more recombinase(s) under the control of an inducible promoter and one or more inverted excision genes, wherein the excision gene(s) encode an enzyme that deletes an essential gene. In some embodiments, the genetically engineered bacteria further comprise one or more genes encoding an antitoxin. In some embodiments, the engineered bacteria further comprise one or more genes encoding a toxin under the control of a promoter having a TetR repressor binding site and a gene encoding the TetR under the control of an inducible promoter that is induced by arabinose, such as P_{araBAD}. In some embodiments, the genetically engineered bacteria further comprise one or more genes encoding an antitoxin.

[0137] In some embodiments, the genetically engineered bacteria are an auxotroph comprising gene sequence encoding a branched chain amino acid catabolism enzyme and further comprises a kill-switch circuit, such as any of the kill-switch circuits described herein.

[0138] In some embodiments of the above described genetically engineered bacteria, the gene encoding a branched chain amino acid catabolism enzyme is present on a plasmid in the bacterium. In some embodiments, the gene encoding a branched chain amino acid catabolism enzyme is present in the bacterial chromosome. In some embodiments, the gene sequence(s) encoding a BCAA transporter or other amino acid transporter that transports one or more BCAA(s) into the bacterial cell, for example a transporter that is capable of transporting leucine, valine, and/or isoleucine into a bacterial cell, is present on a plasmid in the bacterium. In some embodiments, the gene sequence(s) encoding a BCAA transporter or other amino acid transporter that transports one or more BCAA(s) into the bacterial cell, for example a transporter that is capable of transporting leucine, valine, and/or isoleucine into a bacterial cell, is present in the bacterial chromosome. In some embodiments, the gene sequence encoding a secretion protein or protein complex for secreting a biomolecule, such as any of the secretion systems disclosed herein, is present on a plasmid in the bacterium. In some embodiments, the gene sequence encoding a secretion protein or protein complex for secreting a biomolecule, such as any of the secretion systems disclosed herein, is present in the bacterial chromosome. In some embodiments, the gene sequence(s) encoding an antibiotic resistance gene is present on a plasmid in the bacterium. In some embodiments, the gene sequence(s) encoding an antibiotic resistance gene is present in the bacterial chromosome.

[0139] Branched Chain Amino Acid Catabolism Enzymes

[0140] As used herein, the term “branched chain amino acid catabolic or catabolism enzyme” refers to an enzyme involved in the catabolism of a branched chain amino acid to its corresponding α-keto acid counterpart; or the catabolism of an alpha-keto acid to its corresponding aldehyde, acyl-CoA, alcohol, carboxylic acid, or other metabolite counterpart. In some embodiments, the present disclosure provides an engineered bacterium comprising gene sequence(s) encoding one or more branched chain amino acid catabolism enzyme(s). In some embodiments, the branched chain amino acid catabolism enzyme is used to convert a branched chain amino acid, e.g., leucine, valine, isoleucine, to its corresponding α-keto-acid, e.g., α-ketoisocaproate, α-keto-β-methylvalerate, and α-ketoisovalerate. In some embodiments, wherein a branched chain amino acid catabolism enzyme is used to convert a branched chain amino acid, e.g., leucine, valine, isoleucine, to its corresponding α-keto-acid, the engineered bacteria further comprise one or more branched chain amino acid catabolism enzyme(s) to convert an α-keto-acid to its corresponding acetyl CoA, e.g., isovaleryl-CoA, α-methylbutyryl-CoA, and isobutyryl-CoA. In some embodiments, wherein a branched chain amino acid catabolism enzyme is used to convert a branched chain amino acid, e.g., leucine, valine, isoleucine, to its corresponding α-keto-acid, the engineered bacteria further comprise one or more branched chain amino acid catabolism enzyme(s) to convert an α-keto-acid to its corresponding aldehyde, e.g., isovaleraldehyde, isobutyraldehyde, and 2-methylbutyraldehyde. In some embodiments, the engineered bacteria may further comprise an alcohol dehydrogenase enzyme in order to convert the branched chain amino acid-derived aldehyde (e.g., isovaleraldehyde, isobutyraldehyde, 2-methylbutyraldehyde) to its respective alcohol. In some embodiments, the engineered bacteria may further comprise an aldehyde dehydrogenase enzyme in order to convert the branched chain amino acid-derived aldehyde (e.g., isovaleraldehyde, isobutyraldehyde, 2-methylbutyraldehyde) to its respective carboxylic acid.

[0141] Enzymes involved in the catabolism of branched chain amino acids are well known to those of skill in the art. For example, in bacteria, leucine dehydrogenase (LeuDH), branched chain amino acid transferase (IlvE), amino acid oxidase (also known as amino acid deaminase) (L-AAD), as well as other known enzymes, can be used to convert a BCAA to its corresponding α-keto acid, e.g., ketoisocaproate (KIC), ketoisovalerate (KIV), and ketomethylvalerate (KMV). Leucine dehydrogenases, branched chain amino acid transamination enzymes (EC 2.6.1.42), and L-amino acid deaminases (L-AAD), which oxidatively deaminate branched chain amino acids into their respective alpha-keto acid, are known (Baker et al., Structure, 3(7):693-705, 1995; Peng et al., J. Bact., 139(2):339-45, 1979; and Kline et al., J. Bact., 130(2):951-3, 1977). In bacteria, branched chain keto acid dehydrogenases (“BCKDs”) are enzyme complexes that oxidatively decarboxylate all three branched chain keto acids into their respective acyl-CoA derivatives. Thus, in one embodiment, the branched chain amino acid catabolism enzyme is a branched chain keto acid dehydrogenase (BCKD). Moreover, in mammals, dehydrogenases specific for 2-ketoisovalerate (EC 1.2.4.4) and 2-keto-3-methylvalerate and 2-keto-isocaproate (EC 1.2.4.3) have been identified (see, for example, Massey et al., Bacteriol Rev., 40(1):42-54, 1976). In bacteria, branched chain keto acid dehydrogenases (“BCKDs”) are enzyme complexes that oxidatively decarboxylate all three branched chain keto acids into their respective acyl-CoA derivatives. Also, for example, in bacteria, α-ketoisovalerate decarboxylase (KivD) enzymes are capable of converting α-keto acids into aldehydes (e.g., isovaleraldehyde, isobutyraldehyde, 2-methylbutyraldehyde). Specifically, the α-ketoisovalerate decarboxylase enzyme KivD is capable of metabolizing valine by converting α-ketoisovalerate to isobutyraldehyde (see, for example, de la Plaza et al., FEMS Microbiol. Lett. 2004, 238(2):367-374). KivD is capable of metabolizing leucine by converting α-ketoisocaproate (KIC) to isovaleraldehyde. KivD is also capable of metabolizing isoleucine by converting α-ketomethylvalerate (KMV) to 2-methylbutyraldehyde. In addition, enzymes for converting isovaleraldehyde, isobutyraldehyde, and 2-methylbutyraldehyde to their respective alcohols or carboxylic acids are known and available. For example, alcohol dehydrogenases (e.g., Adh2, YqhD) can convert isovaleraldehyde, isobutyraldehyde, 2-methylbutyraldehyde to isopentanol, isobutanol, and 2-methylbutanol, respectively. Aldehyde dehydrogenases (e.g., PadA) can convert isovaleraldehyde, isobutyraldehyde, 2-methylbutyraldehyde to isovalerate, isobutyrate, and 2-methylbutyrate, respectively.

[0142] In some embodiments, the branched chain amino acid catabolism enzyme increases the rate of branched chain amino acid catabolism. In some embodiments, the branched chain amino acid catabolism enzyme decreases the level of one or more branched chain amino acids, e.g., leucine, isoleucine, and/or valine, in a cell, tissue, or organism. In some embodiments, the branched chain amino acid catabolism enzyme decreases the level of alpha-keto acid derived from BCAA in a cell, tissue, or organism. In some embodiments, the branched chain amino acid catabolism enzyme decreases the level of branched chain amino acid as compared to the level of its corresponding alpha-keto acid in a cell, tissue, or organism. In other embodiments, the branched chain amino acid catabolism enzyme increases the level of alpha-keto acid as compared to the level of its corresponding branched chain amino acid in a cell, tissue, or organism. In some embodiments, the branched chain amino acid catabolism enzyme decreases the level of the branched chain amino acid as compared to the level of its corresponding Acyl-CoA derivative in a cell, tissue, or organism. In some embodiments, the branched chain amino acid catabolism enzyme increases the level of the Acyl-CoA derivative as compared to the level of the branched chain amino acid in a cell, tissue, or organism. In some embodiments, the branched chain amino acid catabolism enzyme decreases the level of alpha-keto aldehyde derived from BCAA, e.g., isovaleraldehyde, isobutyraldehyde, and 2-methylbutyraldehyde, in a cell, tissue, or organism. In some embodiments, the branched chain amino acid catabolism enzyme decreases the level of branched chain amino acid as compared to the level of its corresponding alpha-keto aldehyde, e.g., isovaleraldehyde, isobutyraldehyde, and 2-methylbutyraldehyde, in a cell, tissue, or organism. In other embodiments, the branched chain amino acid catabolism enzyme increases the level of alpha-keto aldehyde, e.g., isovaleraldehyde, isobutyraldehyde, and 2-methylbutyraldehyde, as compared to the level of its corresponding branched chain amino acid in a cell, tissue, or organism. In some embodiments, the branched chain amino acid catabolism enzyme decreases the level of a corresponding downstream metabolite, e.g., isovalerate, isobutyrate, 2-methylbutyrate, isopentanol, isobutanol, and 2-methylbutanol, in a cell, tissue, or organism. In some embodiments, the branched chain amino acid catabolism enzyme decreases the level of branched chain amino acid as compared to the level of a corresponding downstream metabolite, e.g., isovalerate, isobutyrate, 2-methylbutyrate, isopentanol, isobutanol, and 2-methylbutanol, in a cell, tissue, or organism. In other embodiments, the branched chain amino acid catabolism enzyme increases the level of a downstream metabolite, e.g., isovalerate, isobutyrate, 2-methylbutyrate, isopentanol, isobutanol, and 2-methylbutanol, as compared to the level of its corresponding branched chain amino acid in a cell, tissue, or organism.

[0143] In some embodiments, the branched chain amino acid catabolism enzyme is a leucine catabolism enzyme. In other embodiments, the branched chain amino acid catabolism enzyme is an isoleucine catabolism enzyme. In other embodiments, the branched chain amino acid catabolism enzyme is a valine catabolism enzyme. In some embodiments, the branched chain amino acid catabolism enzyme is involved in the catabolism of leucine, isoleucine, and valine. In another embodiment, the branched chain amino acid catabolism enzyme is involved in the catabolism of leucine and valine, isoleucine and valine, or leucine and isoleucine. In some embodiments, the branched chain amino acid catabolism enzyme converts leucine, isoleucine, and/or valine into its corresponding α-keto acid. In certain specific embodiments, the present disclosure provides an engineered bacterium comprising gene sequence(s) encoding one or more catabolism enzymes selected from leucine dehydrogenase (LeuDH), BCAA aminotransferase (IlvE), and/or amino acid oxidase (L-AAD).

[0144] In some embodiments, the branched chain amino acid catabolism enzyme is an alpha-ketoisocaproic acid (KIC) catabolism enzyme. In other embodiments, the branched chain amino acid catabolism enzyme is an alpha-ketoisovaleric acid (KIV) catabolism enzyme. In other embodiments, the branched chain amino acid catabolism enzyme is an alpha-keto-beta-methylvaleric acid (KMV) catabolism enzyme. In other embodiments, the branched chain amino acid catabolism enzyme is involved in the catabolism of alpha-ketoisocaproic acid (KIC), alpha-ketoisovaleric acid (KIV), and alpha-keto-beta-methylvaleric acid (KMV). In other embodiments, the branched chain amino acid catabolism enzyme is involved in the catabolism of KIC and KIV, KIC and KMV, or KIV and KMV. In some embodiments, the branched chain amino acid catabolism enzyme converts alpha-ketoisocaproic acid (KIC), alpha-ketoisovaleric acid (KIV), and/or alpha-keto-beta-methylvaleric acid (KMV) into its corresponding aldehyde, e.g., isovaleraldehyde, isobutyraldehyde, and/or 2-methylbutyraldehyde. In some embodiments, the present disclosure provides an engineered bacterium comprising gene sequence(s) encoding KivD.

[0145] In one embodiment, the branched chain amino acid catabolism enzyme is an isovaleraldehyde catabolism enzyme. In another embodiment, the branched chain amino acid catabolism enzyme is an isobutyraldehyde catabolism enzyme. In another embodiment, the branched chain amino acid catabolism enzyme is 2-methylbutyraldehyde catabolism enzyme. In another embodiment, the branched chain amino acid catabolism enzyme is involved in the catabolism of isovaleraldehyde, isobutyraldehyde, and 2-methylbutyraldehyde. In another embodiment, the branched chain amino acid catabolism enzyme is involved in the catabolism of isovaleraldehyde and isobutyraldehyde, isovaleraldehyde and 2-methylbutyraldehyde, or isobutyraldehyde and 2-methylbutyraldehyde. In some embodiments, the present disclosure provides an engineered bacterium comprising gene sequence(s) encoding one or more alcohol dehydrogenase(s), e.g., Ahd2.

[0146] In some embodiments, the present disclosure provides an engineered bacterium comprising gene sequence(s) encoding one or more branched chain amino acid catabolism enzyme(s) involved in the catabolism of leucine, isoleucine, and/or valine, and further comprises gene sequence(s) encoding one or more branched chain amino acid catabolism enzyme(s) involved in the catabolism of KIC, KIV, and/or KMV. In some embodiments, the present disclosure provides an engineered bacteria comprising gene sequence(s) encoding one or more branched chain amino acid catabolism enzyme(s) involved in the catabolism of leucine, isoleucine, and/or valine, further comprises gene sequence(s) encoding one or more branched chain amino acid catabolism enzyme(s) involved in the catabolism of KIC, KIV, and/or KMV, and further comprises gene sequence(s) encoding one or more branched chain amino acid catabolism enzyme(s) involved in the catabolism of. isovaleraldehyde, isobutyraldehyde, and/or 2-methylbutyraldehyde. In some embodiments, the present disclosure provides an engineered bacterium comprising gene sequence(s) encoding one or more branched chain amino acid catabolism enzyme(s) selected from LeuDH, KivD, and Adh2.

[0147] In some embodiments, the present disclosure provides an engineered bacterium comprising gene sequence(s) encoding one or more branched chain amino acid catabolism enzyme(s) involved in the conversion of leucine, isoleucine, and/or valine to KIC, KIV, and/or KMV, respectively. In some embodiments, the present disclosure provides an engineered bacterium comprising gene sequence(s) encoding one or more branched chain amino acid catabolism enzyme(s) involved in the conversion of KIC, KIV, and/or KMV to isovaleraldehyde, isobutyraldehyde, and/or 2-methylbutyraldehyde, respectively. In some embodiments, the present disclosure provides an engineered bacterium comprising gene sequence(s) encoding one or more branched chain amino acid catabolism enzyme(s) involved in the conversion of isovaleraldehyde, isobutyraldehyde, and/or 2-methylbutyraldehyde to isovalerate, isobutyrate, and/or 2-methylbutyrate, respectively. In some embodiments, the present disclosure provides an engineered bacterium comprising gene sequence(s) encoding one or more branched chain amino acid catabolism enzyme(s) involved in the conversion of isovaleraldehyde, isobutyraldehyde, and/or 2-methylbutyraldehyde to isopentanol, isobutanol, and/or 2-methylbutanol respectively.

[0148] In some embodiments, the present disclosure provides an engineered bacteria comprising gene sequence(s) encoding one or more branched chain amino acid catabolism enzyme(s) involved in the conversion of leucine, isoleucine, and/or valine to KIC, KIV, and/or KMV, respectively, and further comprises gene sequence(s) encoding one or more branched chain amino acid catabolism enzyme(s) involved in the conversion of KIC, KIV, and/or KMV to isovaleraldehyde, isobutyraldehyde, and/or 2-methylbutyraldehyde, respectively. In some embodiments, the present disclosure provides an engineered bacterium comprising gene sequence(s) encoding one or more branched chain amino acid catabolism enzyme(s) involved in the conversion of KIC, KIV, and/or KMV to isovaleraldehyde, isobutyraldehyde, and/or 2-methylbutyraldehyde, respectively, and further comprises gene sequence(s) encoding one or more branched chain amino acid catabolism enzyme(s) involved in the conversion of. isovaleraldehyde, isobutyraldehyde, and/or 2-methylbutyraldehyde to isovalerate, isobutyrate, and/or 2-methylbutyrate, respectively. In some embodiments, the present disclosure provides an engineered bacteria comprising gene sequence(s) encoding one or more branched chain amino acid catabolism enzyme(s) involved in the conversion of KIC, KIV, and/or KMV to isovaleraldehyde, isobutyraldehyde, and/or 2-methylbutyraldehyde, respectively, and further comprises gene sequence(s) encoding one or more branched chain amino acid catabolism enzyme(s) involved in the conversion of isovaleraldehyde, isobutyraldehyde, and/or 2-methylbutyraldehyde to isopentanol, isobutanol, and/or 2-methylbutanol respectively.

[0149] In some embodiments, the present disclosure provides an engineered bacteria comprising gene sequence(s) encoding one or more branched chain amino acid catabolism enzyme(s) involved in the conversion of leucine, isoleucine, and/or valine to KIC, KIV, and/or KMV, respectively, further comprises gene sequence(s) encoding one or more branched chain amino acid catabolism enzyme(s) involved in the conversion of KIC, KIV, and/or KMV to isovaleraldehyde, isobutyraldehyde, and/or 2-methylbutyraldehyde, respectively, and further comprises gene sequence(s) encoding one or more branched chain amino acid catabolism enzyme(s) involved in the conversion of isovaleraldehyde, isobutyraldehyde, and/or 2-methylbutyraldehyde to isovalerate, isobutyrate, and/or 2-methylbutyrate, respectively. In some embodiments, the present disclosure provides an engineered bacteria comprising gene sequence(s) encoding one or more branched chain amino acid catabolism enzyme(s) involved in the conversion of leucine, isoleucine, and/or valine to KIC, KIV, and/or KMV, respectively, further comprises gene sequence(s) encoding one or more branched chain amino acid catabolism enzyme(s) involved in the conversion of KIC, KIV, and/or KMV to isovaleraldehyde, isobutyraldehyde, and/or 2-methylbutyraldehyde, respectively, and further comprises gene sequence(s) encoding one or more branched chain amino acid catabolism enzyme(s) involved in the conversion of. isovaleraldehyde, isobutyraldehyde, and/or 2-methylbutyraldehyde to isopentanol, isobutanol, and/or 2-methylbutanol, respectively. In some embodiments, the present disclosure provides an engineered bacterium comprising gene sequence(s) encoding one or more branched chain amino acid catabolism enzyme(s) selected from LeuDH, KivD, and Adh2.

[0150] Enzymes involved in the catabolism of a branched chain amino acid may be expressed or modified in the bacteria disclosed herein to enhance catabolism of a branched chain amino acid, e.g., leucine. Specifically, when a branched chain amino acid catabolism enzyme is expressed in the engineered bacteria disclosed herein, the engineered bacteria are able to convert (deaminate) more branched chain amino acids (e.g., leucine, valine, isoleucine) into their respective alpha-keto acids (KIC, KIV, KMV) and/or convert more BCAA alpha-keto acids (e.g., KIC, KIV, KMV) into respective BCAA-derived aldehydes (e.g., isovaleraldehyde, isobutyraldehyde, 2-methylbutyraldehyde) and/or convert more BCAA-derived aldehydes into respective alcohols (e.g., isopentanol, isobutanol, 2-methylbutanol) and/or convert more BCAA-derived aldehydes into respective carboxylic acids (isovalerate, isobutyrate, 2-methylbutyrate), and/or convert (decarboxylate) more branched chain alpha-keto acids into their respective acyl-CoA derivatives when the catabolism enzyme(s) is expressed, in comparison with unmodified bacteria of the same bacterial subtype under the same conditions. Thus, for example, the genetically engineered bacteria comprising gene sequence encoding a branched chain amino acid catabolism enzyme can catabolize the branched chain amino acid, e.g., leucine, and/or its corresponding alpha-keto acid, e.g., alpha-ketoisocaproate, to treat diseases associated with catabolism of branched chain amino acids, such as Maple Syrup Urine Disease (MSUD) and others described herein.

[0151] In some embodiments, the engineered bacteria comprise gene sequence(s) encoding one or more branched chain amino acid catabolism enzyme(s) and gene sequence(s) encoding one or more transporter(s) capable of importing a BCAA or metabolite thereof. In some embodiments, the engineered bacteria comprise gene sequence(s) encoding at least one branched chain amino acid catabolism enzyme and gene sequence(s) encoding two or more copies of a transporter capable of importing a BCAA or metabolite thereof. In some embodiments, the engineered bacteria comprise gene sequence(s) encoding at least one branched chain amino acid catabolism enzyme and gene sequence(s) encoding two or more different transporter(s) capable of importing a BCAA or metabolite thereof. In certain embodiments, the transporter is a leucine transporter. In certain embodiments, the transporter is a valine transporter. In certain embodiments, the transporter is an isoleucine transporter. In certain embodiments, the transporter is a branched chain amino acid transporter, e.g., capable of importing leucine, isoleucine, and valine. In certain specific embodiments, the transporter is selected from LivKHMGF and BmQ.

[0152] In some embodiments, the engineered bacteria comprise gene sequence(s) encoding at least one branched chain amino acid catabolism enzyme and gene sequence(s) encoding one or more BCAA binding proteins, e.g., a BCAA binding protein that assists in bringing BCAA(s) into the bacterial cell. In some embodiments, the engineered bacteria comprise gene sequence(s) encoding at least one branched chain amino acid catabolism enzyme, gene sequence(s) encoding one or more transporter(s) capable of importing one or more BCAAs, and gene sequence(s) encoding one or more BCAA binding proteins, e.g., a BCAA binding protein that assists in bringing BCAA(s) into the bacterial cell. In any of these embodiments, the engineered bacteria comprise gene sequence(s) encoding two or more copies of a BCAA binding protein. In any of these embodiments, the engineered bacteria comprise gene sequence(s) encoding two or more different BCAA binding proteins. In certain embodiments, the BCAA binding protein is LivJ.

[0153] In any of the embodiments described above and herein, the engineered bacteria may further comprise one or more genetic modification(s) that reduces export of a branched chain amino acid from the bacteria, e.g., a deletion or mutation in at least one gene associated with the export of a BCAA, e.g., deletion or mutation in leuE gene and/or its promoter (which reduces or eliminates the export of leucine). In some embodiments, the engineered bacteria comprise gene sequence(s) encoding at least one branched chain amino acid catabolism enzyme and at least one genetic modification that reduces export of a branched chain amino acid. In certain specific embodiments, the engineered bacteria comprise gene sequence(s) encoding at least one branched chain amino acid catabolism enzyme, gene sequence(s) encoding one or more transporter(s) capable of importing a BCAA, and at least one genetic modification that reduces export of a branched chain amino acid. In certain specific embodiments, the engineered bacteria comprise gene sequence(s) encoding at least one branched chain amino acid catabolism enzyme, gene sequence(s) encoding one or more transporter(s) capable of importing a BCAA, gene sequence(s) encoding one or more BCAA binding proteins, and at least one genetic modification that reduces export of a branched chain amino acid. In some embodiments, the engineered bacteria comprise gene sequence(s) encoding at least one branched chain amino acid catabolism enzyme, gene sequence(s) encoding one or more BCAA binding proteins, and at least one genetic modification that reduces export of a branched chain amino acid. In any of these embodiments, the genetic modification may be a deletion or mutation in one or more gene(s) that allow or assist in the export of a BCAA. In any of these embodiment, the genetic modification may be a deletion or mutation in a leuE gene and/or its promoter.

[0154] In any of the embodiments described above and herein, the engineered bacteria comprise gene sequence(s) encoding one or more branched chain amino acid catabolism enzyme(s), and at least one genetic modification that reduces endogenous biosynthesis of a branched chain amino acid, for example, a deletion or mutation in at least one gene required for BCAA synthesis, e.g., deletion or mutation in ilvC gene and/or its promoter, which gene is required for BCAA synthesis and whose absence creates an auxotroph requiring the bacterial cell to import leucine. In some embodiments, the engineered bacteria comprise gene sequence(s) encoding one or more branched chain amino acid catabolism enzyme(s), gene sequence(s) encoding one or more transporter(s) capable of importing a BCAA, and at least one genetic modification that reduces endogenous biosynthesis of a branched chain amino acid, for example, a deletion or mutation in at least one gene required for BCAA synthesis. In some embodiments, the engineered bacteria comprise gene sequence(s) encoding at least one branched chain amino acid catabolism enzyme, gene sequence(s) encoding one or more BCAA binding proteins, and at least one genetic modification that reduces endogenous biosynthesis of a branched chain amino acid. In some embodiments, the engineered bacteria comprise gene sequence(s) encoding at least one branched chain amino acid catabolism enzyme, at least one genetic modification that reduces export of a branched chain amino acid, and at least one genetic modification that reduces endogenous biosynthesis of a branched chain amino acid. In some embodiments, the engineered bacteria comprise gene sequence(s) encoding at least one branched chain amino acid catabolism enzyme, gene sequence(s) encoding one or more transporter(s) capable of importing a BCAA, gene sequence(s) encoding one or more BCAA binding proteins, and at least one genetic modification that reduces endogenous biosynthesis of a branched chain amino acid. In some embodiments, the engineered bacteria comprise gene sequence(s) encoding at least one branched chain amino acid catabolism enzyme, gene sequence(s) encoding one or more transporter(s) capable of importing a BCAA, at least one genetic modification that reduces export of a branched chain amino acid, and at least one genetic modification that reduces endogenous biosynthesis of a branched chain amino acid. In some embodiments, the engineered bacteria comprise gene sequence(s) encoding at least one branched chain amino acid catabolism enzyme, gene sequence(s) encoding one or more BCAA binding proteins, at least one genetic modification that reduces export of a branched chain amino acid, and at least one genetic modification that reduces endogenous biosynthesis of a branched chain amino acid. In some embodiments, the engineered bacteria comprise gene sequence(s) encoding at least one branched chain amino acid catabolism enzyme, gene sequence(s) encoding one or more transporter(s) capable of importing a BCAA, gene sequence(s) encoding one or more BCAA binding proteins, at least one genetic modification that reduces export of a branched chain amino acid, and at least one genetic modification that reduces endogenous biosynthesis of a branched chain amino acid. In any of these embodiments, the at least one genetic modification that reduces endogenous biosynthesis of a branched chain amino acid can be a deletion or mutation in at least one gene required for BCAA synthesis, e.g., deletion or mutation in ilvC gene and/or its promoter.

[0155] In any of the embodiments described above and herein, the gene sequence(s) encoding at least one branched chain amino acid catabolism enzyme, and/or gene sequence(s) encoding one or more transporter(s) capable of importing a BCAA, and/or gene sequence(s) encoding one or more BCAA binding proteins, and/or other sequence can be present in the bacterial chromosome. In any of the embodiments described above and herein, the gene sequence(s) encoding at least one branched chain amino acid catabolism enzyme, and/or gene sequence(s) encoding one or more transporter(s) capable of importing a BCAA, and/or gene sequence(s) encoding one or more BCAA binding proteins, and/or other sequence can be present in one or more plasmids.

[0156] In some embodiments, the engineered bacteria comprise gene sequence(s) encoding one or more branched chain amino acid catabolism enzyme(s) in which the one or more enzymes are from a different organism, e.g., a different species of bacteria. In some embodiments, the engineered bacteria comprise gene sequence(s) encoding one or more branched chain amino acid catabolism enzyme(s) in which the one or more enzymes are native to the bacterium. In some embodiments, the engineered bacteria comprise gene sequence(s) encoding one or more branched chain amino acid catabolism enzyme(s) in which one or more of the enzymes are native and one or more of the enzymes are from a different organism, e.g., a different species of bacteria. In other embodiments, the bacterial cell comprises more than one copy of a native gene encoding a branched chain amino acid catabolism enzyme. In other embodiments, the bacterial cell comprises more than one copy of a non-native gene encoding a branched chain amino acid catabolism enzyme. In other embodiments, the bacterial cell comprises at least one, two, three, four, five, six or more copies of a gene encoding a branched chain amino acid catabolism enzyme, which can be native or non-native. In other embodiments, the bacterial cell comprises multiple copies of a gene encoding a branched chain amino acid catabolism enzyme. In some embodiments, the bacterial cell comprises gene sequence(s) encoding multiple copies of two or more different branched chain amino acid catabolism enzymes.

[0157] In some embodiments, the engineered bacteria comprise gene sequence(s) encoding one or more branched chain amino acid transporters in which the one or more transporters are from a different organism, e.g., a different species of bacteria. In some embodiments, the engineered bacteria comprise gene sequence(s) encoding one or more branched chain amino acid transporter(s) in which the one or more transporters are native to the bacterium. In some embodiments, the engineered bacteria comprise gene sequence(s) encoding one or more branched chain amino acid transporters(s) in which one or more of the transporters are native and one or more of the transporters are from a different organism, e.g., a different species of bacteria. In other embodiments, the bacterial cell comprises more than one copy of a native gene encoding a branched chain amino acid transporter. In other embodiments, the bacterial cell comprises more than one copy of a non-native gene encoding a branched chain amino acid transporter. In other embodiments, the bacterial cell comprises at least one, two, three, four, five, six or more copies of a gene encoding a branched chain amino acid transporter, which can be native or non-native. In other embodiments, the bacterial cell comprises multiple copies of a gene encoding a branched chain amino acid transporters. In some embodiments, the bacterial cell comprises gene sequence(s) encoding multiple copies of two or more different branched chain amino acid transporters.

[0158] In some embodiments, the engineered bacteria comprise gene sequence(s) encoding one or more branched chain amino acid binding protein(s) in which the one or more binding protein(s) are from a different organism, e.g., a different species of bacteria. In some embodiments, the engineered bacteria comprise gene sequence(s) encoding one or more branched chain amino acid binding protein(s) in which the one or more binding protein(s) are native to the bacterium. In some embodiments, the engineered bacteria comprise gene sequence(s) encoding one or more branched chain amino acid binding protein(s) in which one or more of the binding protein(s) are native and one or more of the binding protein(s) are from a different organism, e.g., a different species of bacteria. In other embodiments, the bacterial cell comprises more than one copy of a native gene encoding a branched chain amino acid binding protein. In other embodiments, the bacterial cell comprises more than one copy of a non-native gene encoding a branched chain amino acid binding protein. In other embodiments, the bacterial cell comprises at least one, two, three, four, five, six or more copies of a gene encoding a branched chain amino acid binding protein, which can be native or non-native. In other embodiments, the bacterial cell comprises multiple copies of a gene encoding a branched chain amino acid binding protein. In some embodiments, the bacterial cell comprises gene sequence(s) encoding multiple copies of two or more different branched chain amino acid binding proteins.

[0159] Branched chain amino acid catabolism enzymes are known in the art. In some embodiments, the branched chain amino acid catabolism enzyme is encoded by a gene encoding a branched chain amino acid catabolism enzyme derived from a bacterial species. In some embodiments, a branched chain amino acid catabolism enzyme is encoded by a gene encoding a branched chain amino acid catabolism enzyme derived from a non-bacterial species. In some embodiments, a branched chain amino acid catabolism enzyme is encoded by a gene derived from a eukaryotic species, e.g., a yeast species or a plant species. In one embodiment, a branched chain amino acid catabolism enzyme is encoded by a gene derived from a mammalian species, e.g., a human. In some embodiments, the engineered bacteria comprise gene sequence(s) encoding at least one branched chain amino acid catabolism enzyme derived from a bacterial species and at least one branched chain amino acid catabolism enzyme derived from a non-bacterial species. In one embodiment, the gene encoding the branched chain amino acid catabolism enzyme is derived from an organism of the genus or species that includes, but is not limited to, Acetinobacter, Azospirillum, Bacillus, Bacteroides, Bifidobacterium, Brevibacteria, Burkholderia, Citrobacter, Clostridium, Corynebacterium, Cronobacter, Enterobacter, Enterococcus, Erwinia, Helicobacter, Klebsiella, Lactobacillus, Lactococcus, Leishmania, Listeria, Macrococcus, Mycobacterium, Nakamurella, Nasonia, Nostoc, Pantoea, Pectobacterium, Pseudomonas, Psychrobacter, Ralstonia, Saccharomyces, Salmonella, Sarcina, Serratia, Staphylococcus, and Yersinia, e.g., Acetinobacter radioresistens, Acetinobacter baumannii, Acetinobacter calcoaceticus, Azospirillum brasilense, Bacillus anthracis, Bacillus cereus, Bacillus coagulans, Bacillus megaterium, Bacillus subtilis, Bacillus thuringiensis, Bacteroides fragilis, Bacteroides subtilis, Bacteroides thetaiotaomicron, Bifdobacterium bifidum, Bifdobacterium infantis, Bifidobacterium lactis, Bifdobacterium longum, Burkholderia xenovorans, Citrobacter youngae, Citrobacter koseri, Citrobacter rodentium, Clostridium acetobutylicum, Clostridium butyricum, Corynebacterium aurimucosum, Corynebacterium kroppenstedtii, Corynebacterium striatum, Cronobacter sakazakii, Cronobacter turicensis, Enterobacter cloacae, Enterobacter cancerogenus, Enterococcus faecium, Erwinia amylovara, Erwinia pyrifoliae, Erwinia tasmaniensis, Helicobacter mustelae, Klebsiella pneumonia, Klebsiella variicola, Lactobacillus acidophilus, Lactobacillus bulgaricus, Lactobacillus casei, Lactobacillus johnsonii, Lactobacillus paracasei, Lactobacillus plantarum, Lactobacillus reuteri, Lactobacillus rhamnosus, Lactococcus lactis, Leishmania infantum, Leishmania major, Leishmania brazilensis, Listeria grayi, Macrococcus caseolyticus, Mycobacterium avium, Mycobacterium intracellulare, Mycobacterium kansasii, Mycobacterium leprae, Mycobacterium marinum, Mycobacterium smegmatis, Mycobacterium tuberculosis, Mycobacterium ulcerans, Nakamurella multipartita, Nasonia vitipennis, Nostoc punctiforme, Pantoea ananatis, Pantoea agglomerans, Pectobacterium atrosepticum, Pectobacterium carotovorum, Pseudomonas aeruginosa, Psychrobacter articus, Psychrobacter cryohalolentis, Ralstonia eutropha, Saccharomyces boulardii, Salmonella enterica, Sarcina ventriculi, Serratia odorifera, Serratia proteamaculans, Staphylococcus aerus, Staphylococcus capitis, Staphylococcys carnosus, Staphylococcus epidermidis, Staphylococcus hominis, Staphylococcus haemolyticus, Staphylococcus lugdunensis, Staphylococcus saprophyticus, Staphylococcus warneri, Yersinia enterocolitica, Yersinia mollaretii, Yersinia kristensenii, Yersinia rohdei, and Yersinia aldovae.

[0160] In some embodiments, the gene encoding a branched chain amino acid catabolism enzyme, BCAA transporter, BCAA binding protein, and/or other sequence has been codon-optimized for use in the host organism. In one embodiment, the gene encoding a branched chain amino acid catabolism enzyme has been codon-optimized for use in Escherichia coli.

[0161] In some embodiments, the branched chain amino acid catabolism enzyme converts a branched chain amino acid to its corresponding alpha-keto acid. Such enzymes include, for example, LeuDH. In other embodiments, the branched chain amino acid catabolism enzyme converts a branched chain keto acid to its corresponding aldehyde. For example, in some embodiments, the branched chain amino acid catabolism enzyme is an α-ketoisovalerate decarboxylase (KivD).

[0162] In other embodiments, the branched chain amino acid catabolism enzyme converts an aldehyde into its corresponding alcohol. For example, the branched chain amino acid catabolism enzyme may be an alcohol dehydrogenase. In one embodiment, the alcohol dehydrogenase is Adh2.

[0163] In some embodiments, the engineered bacteria comprise gene sequence(s) encoding one or more transporter(s) capable of importing a BCAA or metabolite thereof. In certain embodiments, the transporter is a leucine transporter. In certain embodiments, the transporter is a valine transporter. In certain embodiments, the transporter is an isoleucine transporter. In certain embodiments, the transporter is a branched chain amino acid transporter, e.g., capable of importing leucine, isoleucine, and valine. The term “BCAA transporter” is meant to refer to a transporter that specifically transports leucine, isoleucine, or valine, and also to a transporter that is able to transport any BCAA, including for example, the ability to transport leucine, isoleucine, and valine. For example, in some embodiments, the transporter is LivKHMGF. In some embodiments, the transporter is BmQ.

[0164] The present disclosure further comprises genes encoding functional fragments of a branched chain amino acid catabolism enzyme, BCAA transporter, BCAA binding protein, and/or other sequence or functional variants of a branched chain amino acid catabolism enzyme, BCAA transporter, BCAA binding protein, and/or other sequence. As used herein, the term “functional fragment thereof” or “functional variant thereof” of a branched chain amino acid catabolism enzyme, BCAA transporter, BCAA binding protein, and/or other sequence refers to fragment or variant sequence having qualitative biological activity in common with the wild-type branched chain amino acid catabolism enzyme, BCAA transporter, BCAA binding protein, and/or other sequence from which the fragment or variant was derived. For example, a functional fragment or a functional variant of a mutated branched chain amino acid catabolism enzyme is one which retains essentially the same ability to catabolize a branched chain amino acid and/or its corresponding alpha-keto acid or aldehyde or other metabolite as the branched chain amino acid catabolism enzyme from which the functional fragment or functional variant was derived. For example, a polypeptide having branched chain amino acid catabolism enzyme activity may be truncated at the N-terminus or C-terminus and the retention of branched chain amino acid catabolism enzyme activity assessed using assays known to those of skill in the art, including the exemplary assays provided herein. In one embodiment, the recombinant bacterial cell disclosed herein comprises a heterologous gene encoding a branched chain amino acid catabolism enzyme functional variant. In another embodiment, the recombinant bacterial cell disclosed herein comprises a heterologous gene encoding a branched chain amino acid catabolism enzyme functional fragment.

[0165] The present disclosure encompasses genes encoding a branched chain amino acid catabolism enzyme, BCAA transporter, BCAA binding protein, and/or other sequence comprising amino acids in its sequence that are substantially the same as an amino acid sequence described herein. Amino acid sequences that are substantially the same as the sequences described herein include sequences comprising conservative amino acid substitutions, as well as amino acid deletions and/or insertions. A conservative amino acid substitution refers to the replacement of a first amino acid by a second amino acid that has chemical and/or physical properties (e.g., charge, structure, polarity, hydrophobicity/hydrophilicity) that are similar to those of the first amino acid. Conservative substitutions include replacement of one amino acid by another within the following groups: lysine (K), arginine (R) and histidine (H); aspartate (D) and glutamate (E); asparagine (N), glutamine (Q), serine (S), threonine (T), tyrosine (Y), K, R, H, D and E; alanine (A), valine (V), leucine (L), isoleucine (I), proline (P), phenylalanine (F), tryptophan (W), methionine (M), cysteine (C) and glycine (G); F, W and Y; C, S and T. Similarly contemplated is replacing a basic amino acid with another basic amino acid (e.g., replacement among Lys, Arg, His), replacing an acidic amino acid with another acidic amino acid (e.g., replacement among Asp and Glu), replacing a neutral amino acid with another neutral amino acid (e.g., replacement among Ala, Gly, Ser, Met, Thr, Leu, Ile, Asn, Gln, Phe, Cys, Pro, Trp, Tyr, Val).

[0166] The present disclosure encompasses branched chain amino acid catabolism enzymes, BCAA transporters, BCAA binding proteins, and/or other sequences which have a certain percent identity to a gene or protein sequence described herein. For example, the disclosure encompasses branched chain amino acid catabolism enzymes, BCAA transporters, BCAA binding proteins, and/or other sequences having at least 60%, 65%, 70%, 75%, 80%, 85%, 90%, 91%, 92%, 93%, 94%, 95%, 96%, 97%, 98%, 99%, or 100% identity to a nucleic acid sequence or amino acid sequence disclosed herein. As used herein, the term “percent (%) sequence identity” or “percent (%) identity,” also including “homology,” is defined as the percentage of amino acid residues or nucleotides in a candidate sequence that are identical with the amino acid residues or nucleotides in the reference sequences after aligning the sequences and introducing gaps, if necessary, to achieve the maximum percent sequence identity, and not considering any conservative substitutions as part of the sequence identity. Optimal alignment of the sequences for comparison may be produced, besides manually, by means of the local homology algorithm of Smith and Waterman, 1981, Ads App. Math. 2, 482, by means of the local homology algorithm of Neddleman and Wunsch, 1970, J. Mol. Biol. 48, 443, by means of the similarity search method of Pearson and Lipman, 1988, Proc. Natl. Acad. Sci. USA 85, 2444, or by means of computer programs which use these algorithms (GAP, BESTFIT, FASTA, BLAST P, BLAST N and TFASTA in Wisconsin Genetics Software Package, Genetics Computer Group, 575 Science Drive, Madison, Wis.).

[0167] Assays for testing the activity of a branched chain amino acid catabolism enzyme, BCAA transporter, BCAA binding protein, and/or other sequence, or a functional variant, or a functional fragment thereof are well known to one of ordinary skill in the art. For example, branched chain amino acid catabolism, BCAA transporter, BCAA binding protein, and/or other sequence can be assessed by expressing the protein, functional variant, or fragment thereof, in a recombinant bacterial cell that lacks endogenous branched chain amino acid catabolism enzyme activity. Branched chain amino acid catabolism can be assessed using the coupled enzymatic assay method as described by Zhang et al. (see, for example, Zhang et al., Proc. Natl. Acad. Sci., 105(52):20653-58, 2008). Furthermore, catabolism of branched chain amino acids can also be assessed in vitro by measuring the disappearance of alpha-ketoisovalerate as described by de la Plaza (see, for example, de la Plaza et al., FEMS Microbiol. Letters, 2004, 238(2):367-374). BCAA as well as the branched chain keto acid can be quantified by liquid chromatography tandem mass spectrometry (LC-MS/MS), as described herein.

[0168] In some embodiments, the gene encoding a branched chain amino acid catabolism enzyme, BCAA transporter, BCAA binding protein, and/or other sequence is mutagenized; mutants exhibiting increased activity are selected; and the mutagenized gene encoding the branched chain amino acid catabolism enzyme, BCAA transporter, BCAA binding protein, and/or other sequence is isolated and inserted into the bacterial cell. In some embodiments, the gene encoding an α-ketoisovalerate decarboxylase, e.g., kivD, is mutagenized; mutants exhibiting decreased activity are selected; and the mutagenized gene encoding the α-ketoisovalerate decarboxylase, e.g., kivD, is isolated and inserted into the bacterial cell. The gene comprising the modifications described herein may be present on a plasmid or chromosome.

[0169] In some embodiments, the gene encoding the branched chain amino acid catabolism enzyme, BCAA transporter, BCAA binding protein, and/or other sequence is directly operably linked to a first promoter. In other embodiments, the gene encoding the branched chain amino acid catabolism enzyme, BCAA transporter, BCAA binding protein, and/or other sequence is indirectly operably linked to a first promoter. In some embodiment, the gene encoding the branched chain amino acid catabolism enzyme, BCAA transporter, BCAA binding protein, and/or other sequence is operably linked to a promoter that is not its native promoter.

[0170] In some embodiments, the gene encoding the branched chain amino acid catabolism enzyme, BCAA transporter, BCAA binding protein, and/or other sequence is expressed under the control of a constitutive promote. In other embodiments, the gene encoding the branched chain amino acid catabolism enzyme, BCAA transporter, BCAA binding protein, and/or other sequence is expressed under the control of an inducible promoter. In some embodiments, the gene encoding the branched chain amino acid catabolism enzyme, BCAA transporter, BCAA binding protein, and/or other sequence is expressed under the control of a promoter that is directly or indirectly induced by exogenous environmental conditions. In some embodiments, the gene encoding the branched chain amino acid catabolism enzyme, BCAA transporter, BCAA binding protein, and/or other sequence is expressed under the control of a promoter that is directly or indirectly induced by low-oxygen or anaerobic conditions, wherein expression of the gene encoding the branched chain amino acid catabolism enzyme is activated under low-oxygen or anaerobic environments, such as the environment of the mammalian gut. In some embodiments, the gene encoding the branched chain amino acid catabolism enzyme, BCAA transporter, BCAA binding protein, and/or other sequence is expressed under the control of a promoter that is directly or indirectly induced by inflammatory conditions. Exemplary inducible promoters described herein include oxygen level-dependent promoters (e.g., FNR-inducible promoter), promoters induced by inflammation or an inflammatory response (RNS, ROS promoters), and promoters induced by a metabolite that may or may not be naturally present (e.g., can be exogenously added) in the gut, e.g., arabinose and tetracycline. Examples of inducible promoters include, but are not limited to, an FNR responsive promoter, a P_{araC} promoter, a P_{araBAD} promoter, and a P_{TetR} promoter, each of which are described in more detail herein. Examples of other inducible promoters are provided herein below.

[0171] The gene encoding the branched chain amino acid catabolism enzyme, BCAA transporter, BCAA binding protein, and/or other sequence may be present on a plasmid or chromosome in the bacterial cell. In some embodiments, the gene encoding the branched chain amino acid catabolism enzyme, BCAA transporter, BCAA binding protein, and/or other sequence is located on a plasmid in the bacterial cell. In other embodiments, the gene encoding the branched chain amino acid catabolism enzyme, BCAA transporter, BCAA binding protein, and/or other sequence is located in the chromosome of the bacterial cell. In other embodiments, a native copy of the gene encoding the branched chain amino acid catabolism enzyme, BCAA transporter, BCAA binding protein, and/or other sequence is located in the chromosome of the bacterial cell, and a gene encoding a branched chain amino acid catabolism enzyme, BCAA transporter, BCAA binding protein, and/or other sequence from the same or a different species of bacteria is located on a plasmid in the bacterial cell. In other embodiments, a native copy of the gene encoding the branched chain amino acid catabolism enzyme, BCAA transporter, BCAA binding protein, and/or other sequence is located on a plasmid in the bacterial cell, and a gene encoding the branched chain amino acid catabolism enzyme, BCAA transporter, BCAA binding protein, and/or other sequence from a different species of bacteria is located on a plasmid in the bacterial cell. In other embodiments, a native copy of the gene encoding the branched chain amino acid catabolism enzyme, BCAA transporter, BCAA binding protein, and/or other sequence is located in the chromosome of the bacterial cell, and a gene encoding the branched chain amino acid catabolism enzyme, BCAA transporter, BCAA binding protein, and/or other sequence from a different species of bacteria is located in the chromosome of the bacterial cell.

[0172] In some embodiments, the gene encoding the branched chain amino acid catabolism enzyme, BCAA transporter, BCAA binding protein, and/or other sequence is expressed on a low-copy plasmid. In some embodiments, the gene encoding the branched chain amino acid catabolism enzyme, BCAA transporter, BCAA binding protein, and/or other sequence is expressed on a high-copy plasmid. In some embodiments, the high-copy plasmid may be useful for increasing expression of the branched chain amino acid catabolism enzyme, BCAA transporter, BCAA binding protein, and/or other sequence, thereby increasing the catabolism of the branched chain amino acid, e.g., leucine.

[0173] In some embodiments, the engineered bacteria convert the branched chain amino acid(s) and/or corresponding alpha-keto acid(s) and/or other corresponding metabolite(s) to a non-toxic or low toxicity metabolite, e.g., isovaleraldehyde, isobutyraldehyde, 2-methylbutyraldehyde, isovaleric acid, isobutyric acid, 2-methylbutyric acid, isopentanol, isobutanol, and 2-methylbutanol. Table 3 chart showing that the products of BCAA degradation by the engineered bacteria have very low oral toxicity.

TABLE 3
Toxicity of BCAA degradation products

| | Oral LD50 | Oral NOAEL* |
|---|---|---|
| Compound | (rat) (mg/kg) | (rat)(mg/kg/d) |
| Isovaleraldehyde | 5740 | N/D |
| Isolbutyraldehyde | 3730 | N/D |
| 2-methylbutyraldehyde | 6884 | N/D |
| Isovaleric acid | 2500 | N/D |
| Isobutyric acid | 2230 | N/D |
| 2-metylbutyric acid | 1750 | N/D |
| Isopentanol | >5000 | 1250 |
| Isobutanol | 3350 | >1450 |
| 2-methylbutanol | 4170 | N/D |

*No-Observed-Adverse-Effect

[0174] A. Optimized Branched Chain Ketoacid Decarboxylase

[0175] In one embodiment, the branched chain amino acid catabolism enzyme is an optimized branched chain ketoacid decarboxylase, including but not limited to, KivD. In a non-limiting example, KivD is from Lactococcus lactis. Thus, in some embodiments, the engineered bacteria comprise gene sequence(s) encoding one or more copies of a branched chain ketoacid decarboxylase. In some embodiments, the engineered bacteria comprise gene sequence(s) encoding one, two, three, four, five, six, or more copies of a branched chain ketoacid decarboxylase. The one or more copies of a branched chain ketoacid decarboxylase can be one or more copies of the same gene or can be different genes encoding α-ketoisovalerate decarboxylase, e.g., gene(s) from a different species or otherwise having a different gene sequence. The one or more copies of a branched chain ketoacid decarboxylase can be present in the bacterial chromosome or can be present in one or more plasmids.

[0176] As used herein “α-ketoisovalerate decarboxylase” or “alpha-ketoisovalerate decarboxylase” or “branched-chain α-keto acid decarboxylase” or “α-ketoacid decarboxylase” or “branched chain ketoacid decarboxylase” or “2-ketoisovalerate decarboxylase” (referred to herein also as KivD or ketoisovalerate decarboxylase) refers to any polypeptide having enzymatic activity that catalyzes the conversion of a branched chain alpha-keto acid (BCKA), such as α-ketoisovalerate (2-oxoisopentanoate), α-ketomethylvalerate (3-methyl-2-oxopentanoate), or α-ketoisocaproate 4-methyl-2-oxopentanoate), to its corresponding aldehyde, such as isobutyraldehyde, 2-methylbutyraldehyde, or isovaleraldehyde, and carbon dioxide. Branched chain ketoacid decarboxylase enzymes are available from many microorganism sources, including those disclosed herein. Branched chain ketoacid decarboxylase employs the co-factor thiamine diphosphate (also known as thiamine pyrophosphate or “TPP” or “TDP”). Thiamine is the vitamin form of the co-factor which, when transported into a cell, is converted to thiamine diphosphate. Alpha-ketoisovalerate decarboxylase also employs Mg²⁺. Branched chain ketoacid decarboxylase may be a homotetramer.

[0177] The bacterial cells disclosed herein may comprise a heterologous gene encoding a branched chain ketoacid decarboxylase enzyme and are capable of converting α-keto acids into aldehydes. For example, the branched chain ketoacid decarboxylase enzyme KivD is capable of metabolizing leucine (see, for example, de la Plaza et al., FEMS Microbiol. Lett. 2004, 238(2):367-374), and a cytosolically active KivD should generally exhibit the ability to convert ketoisovalerate, ketomethylvalerate, and ketoisocaproate to isobutyraldehyde, 2-methylbutyraldehyde, and isovaleraldehyde.

[0178] Multiple distinct a branched chain ketoacid decarboxylase proteins are known in the art (see, e.g., US Pat. Appl. Publ. No. 2013/0203138, the entire contents of which are incorporated herein by reference). In some embodiments, branched chain ketoacid decarboxylase is encoded by a branched chain ketoacid decarboxylase gene derived from a bacterial species. In some embodiments, a branched chain ketoacid decarboxylase is encoded by a branched chain ketoacid decarboxylase gene derived from a non-bacterial species. In some embodiments, a branched chain ketoacid decarboxylase is encoded by a branched chain ketoacid decarboxylase gene derived from a eukaryotic species, e.g., a yeast species or a plant species. In some embodiments, a branched chain ketoacid decarboxylase is encoded by a branched chain ketoacid decarboxylase gene derived from a mammalian species. In one embodiment, the a branched chain ketoacid decarboxylase gene is derived from an organism of the genus or species that includes, but is not limited to, Acetinobacter, Azospirillum, Bacillus, Bacteroides, Bifidobacterium, Brevibacteria, Burkholderia, Citrobacter, Clostridium, Corynebacterium, Cronobacter, Enterobacter, Enterococcus, Erwinia, Helicobacter, Klebsiella, Lactobacillus, Lactococcus, Leishmania, Listeria, Macrococcus, Mycobacterium, Nakamurella, Nasonia, Nostoc, Pantoea, Pectobacterium, Psychrobacter, Ralstonia, Saccharomyces, Salmonella, Sarcina, Serratia, Staphylococcus, and Yersinia, e.g., Acetinobacter radioresistens, Acetinobacter baumannii, Acetinobacter calcoaceticus, Azospirillum brasilense, Bacillus anthracis, Bacillus cereus, Bacillus coagulans, Bacillus megaterium, Bacillus subtilis, Bacillus thuringiensis, Bacteroides fragilis, Bacteroides subtilis, Bacteroides thetaiotaomicron, Bifidobacterium bifdum, Bifidobacterium infantis, Bifidobacterium lactis, Bifidobacterium longum, Burkholderia xenovorans, Citrobacter youngae, Citrobacter koseri, Citrobacter rodentium, Clostridium acetobutylicum, Clostridium butyricum, Corynebacterium aurimucosum, Corynebacterium kroppenstedtii, Corynebacterium striatum, Cronobacter sakazakii, Cronobacter turicensis, Enterobacter cloacae, Enterobacter cancerogenus, Enterococcus faecium, Erwinia amylovara, Erwinia pyrifoliae, Erwinia tasmaniensis, Helicobacter mustelae, Klebsiella pneumonia, Klebsiella variicola, Lactobacillus acidophilus, Lactobacillus bulgaricus, Lactobacillus casei, Lactobacillus johnsonii, Lactobacillus paracasei, Lactobacillus plantarum, Lactobacillus reuteri, Lactobacillus rhamnosus, Lactococcus lactis, Leishmania infantum, Leishmania major, Leishmania brazilensis, Listeria grayi, Macrococcus caseolyticus, Mycobacterium avium, Mycobacterium intracellulare, Mycobacterium kansasii, Mycobacterium leprae, Mycobacterium marinum, Mycobacterium smegmatis, Mycobacterium tuberculosis, Mycobacterium ulcerans, Nakamurella multipartita, Nasonia vitipennis, Nostoc punctiforme, Pantoea ananatis, Pantoea agglomerans, Pectobacterium atrosepticum, Pectobacterium carotovorum, Psychrobacter articus, Psychrobacter cryohalolentis, Ralstonia eutropha, Saccharomyces boulardii, Salmonella enterica, Sarcina ventriculi, Serratia odorifera, Serratia proteamaculans, Staphylococcus aerus, Staphylococcus capitis, Staphylococcys carnosus, Staphylococcus epidermidis, Staphylococcus hominis, Staphylococcus haemolyticus, Staphylococcus lugdunensis, Staphylococcus saprophyticus, Staphylococcus warneri, Yersinia enterocolitica, Yersinia mollaretii, Yersinia kristensenii, Yersinia rohdei, and Yersinia aldovae. In some embodiments, the branched chain ketoacid decarboxylase is encoded by an a branched chain ketoacid decarboxylase gene derived from Lactococcus lactis, e.g., IFPL730. In another embodiment, the branched chain ketoacid decarboxylase, e.g., kivD gene, is derived from Enterobacter cloacae (Accession No. P23234.1), Mycobacterium smegmatis (Accession No. A0R480.1), Mycobacterium tuberculosis (Accession NO. 053865.1), Mycobacterium avium (Accession No. Q742Q2.1), Azospirillum brasilense (Accession No. P51852.1), or Bacillus subtilis (see Oku et al., J Biol. Chem. 263: 18386-96, 1988).

[0179] In one embodiment, the branched chain ketoacid decarboxylase gene has been codon-optimized for use in the recombinant bacterial cell. In one embodiment, the branched chain ketoacid decarboxylase gene has been codon-optimized for use in Escherichia coli.

[0180] In one embodiment, the branched chain ketoacid decarboxylase gene is a kivD gene. In another embodiment, the kivD gene is a Lactococcus lactis kivD gene or kivD gene derived from Lactococcus lactis. When a branched chain ketoacid decarboxylase is expressed in the recombinant bacterial cells disclosed herein, the bacterial cells catabolize more branched chain amino acid, e.g., leucine, than unmodified bacteria of the same bacterial subtype under the same conditions (e.g., culture or environmental conditions). Thus, the genetically engineered bacteria comprising a heterologous gene encoding a branched chain ketoacid decarboxylase may be used to catabolize excess branched chain amino acids, e.g., leucine, to treat a disease associated with the catabolism of a branched chain amino acid, including Maple Syrup Urine Disease (MSUD).

[0181] The present disclosure further comprises genes encoding functional fragments of a branched chain ketoacid decarboxylase or functional variants of a branched chain ketoacid decarboxylase gene. As used herein, the term “functional fragment thereof” or “functional variant thereof” of a branched chain ketoacid decarboxylase gene relates to a sequence having qualitative biological activity in common with the wild-type branched chain ketoacid decarboxylase from which the fragment or variant was derived. For example, a functional fragment or a functional variant of a mutated branched chain ketoacid decarboxylase protein is one which retains essentially the same ability to catabolize BCKAs as a branched chain ketoacid decarboxylase protein from which the functional fragment or functional variant was derived. For example, a polypeptide having branched chain ketoacid decarboxylase activity may be truncated at the N-terminus or C-terminus and the retention of branched chain ketoacid decarboxylase activity assessed using assays known to those of skill in the art, including the exemplary assays provided herein. In one embodiment, the recombinant bacterial cell disclosed herein comprises a heterologous gene encoding a branched chain ketoacid decarboxylase functional variant. In another embodiment, the recombinant bacterial cell disclosed herein comprises a heterologous gene encoding a branched chain ketoacid decarboxylase functional fragment.

[0182] Assays for testing the activity of a branched chain ketoacid decarboxylase, a branched chain ketoacid decarboxylase functional variant, or a branched chain ketoacid decarboxylase functional fragment are well known to one of ordinary skill in the art. For example, branched chain ketoacid decarboxylase activity can be assessed by expressing the protein, functional variant, or fragment thereof, in a recombinant bacterial cell that lacks endogenous branched chain ketoacid decarboxylase activity. Also, branched chain ketoacid decarboxylase activity can be assessed using the coupled enzymatic assay method as described by Zhang et al. (see, for example, Zhang et al., Proc. Natl. Acad. Sci., 105(52):20653-58, 2008). Alpha-ketoisovalerate decarboxylase activity can also be assessed in vitro by measuring the disappearance of alpha-ketoisovalerate as described by de la Plaza (see, for example, de la Plaza et al., FEMS Microbiol. Letters, 2004, 238(2):367-374).

[0183] In some embodiments, the gene encoding a branched chain ketoacid decarboxylase, e.g., kivD, is mutagenized; mutants exhibiting increased activity are selected; and the mutagenized gene encoding the α-ketoisovalerate decarboxylase, e.g., kivD, is isolated and inserted into the bacterial cell. The gene comprising the modifications described herein may be present on a plasmid or chromosome.

[0184] Accordingly, in some embodiments, the kivD gene has at least about 80% identity with the entire sequence of any one of SEQ ID NOs: 73-96. Accordingly, in one embodiment, the kivD gene has at least about 90% identity with the entire sequence of any one of SEQ ID NOs: 73-96. Accordingly, in one embodiment, the kivD gene has at least about 95% identity with the entire sequence of any one of SEQ ID NOs: 73-96. Accordingly, in one embodiment, the kivD gene has at least about 85%, 86%, 87%, 88%, 89%, 90%, 91%, 92%, 93%, 94%, 95%, 96%, 97%, 98%, or 99% identity with the entire sequence of any one of SEQ ID NOs: 73-96. In another embodiment, the kivD gene comprises the sequence of any one of SEQ ID NOs: 73-96. In yet another embodiment, the kivD gene consists of any one of SEQ ID NOs: 73-96.

[0185] In other embodiments, the engineered bacteria comprise gene sequence(s) encoding at least one branched chain ketoacid decarboxylase enzyme and further comprise gene sequence encoding one or more polypeptides selected from other branched chain amino acid catabolism enzyme(s), BCAA transporter(s), and BCAA binding protein(s). Thus, in some embodiments, the at least one branched chain ketoacid decarboxylase enzyme is coexpressed with an additional branched chain amino acid catabolism enzyme, e.g., a branched chain amino acid dehydrogenase, amino acid oxidase (also known as amino acid deaminase), and/or aminotransferase. In some embodiments, the at least one α-ketoisovalerate decarboxylase gene is coexpressed with a leucine dehydrogenase, e.g., (leuDH or ldh), described in more detail below. In other embodiments, the at least one branched chain ketoacid decarboxylase gene is coexpressed with a branched chain amino acid aminotransferase, e.g., ilvE, described in more detail below. In other embodiments, the at least one branched chain ketoacid decarboxylase gene is coexpressed with an amino acid deaminase, e.g., L-AAD, described in more detail below. In some embodiments, the engineered bacteria comprise gene sequence(s) encoding at least one branched chain ketoacid decarboxylase enzyme and gene sequence(s) encoding one or more branched chain amino acid dehydrogenase(s) (e.g., leuDH). In some embodiments, the engineered bacteria comprise gene sequence(s) encoding at least one branched chain ketoacid decarboxylase enzyme and gene sequence(s) encoding one or more aminotransferase(s) (e.g., ilvE).

[0186] In some embodiments, the at least one branched chain ketoacid decarboxylase enzyme is coexpressed with an alcohol dehydrogenase, e.g., adh2, described in more detail below. In some embodiments, the engineered bacteria comprise gene sequence(s) encoding at least one branched chain ketoacid decarboxylase enzyme and gene sequence(s) encoding one or more alcohol dehydrogenase(s) (e.g., adh2).

[0187] In some embodiments, the at least one α-ketoisovalerate decarboxylase gene is coexpressed with a leucine dehydrogenase, e.g., leuDH, and an alcohol dehydrogenase, e.g., adh2.

[0188] In some embodiments, the at least one branched chain ketoacid decarboxylase enzyme is coexpressed with one or more BCAA transporter(s), for example, a high affinity leucine transporter, e.g., LivKHMGF and/or low affinity BCAA transporter, e.g., BrnQ. In some embodiments, the engineered bacteria comprise gene sequence(s) encoding at least one branched chain ketoacid decarboxylase enzyme and gene sequence(s) encoding one or more BCAA transporter(s) (e.g., livKHMGF, brnQ).

[0189] In some embodiments, the engineered bacteria comprise gene sequence(s) encoding at least one branched chain ketoacid decarboxylase enzyme and genetic modification that reduces export of a branched chain amino acid, e.g., a genetic mutation in a leuE gene or promoter thereof. In one embodiment, the engineered bacteria comprise gene sequence(s) encoding at least one branched chain ketoacid decarboxylase enzyme and a genetic modification that reduces or eliminates branched chain amino acid synthesis, e.g., a genetic mutation in a ilvC gene or promoter thereof.

[0190] In some embodiments, the gene sequence(s) encoding the one or more branched chain ketoacid decarboxylase enzyme(s) is expressed under the control of a constitutive promoter. In some embodiments, the gene sequence(s) encoding the one or more branched chain ketoacid decarboxylase enzyme(s) is expressed under the control of an inducible promoter. In some embodiments, the gene sequence(s) encoding the one or more branched chain ketoacid decarboxylase enzyme(s) is expressed under the control of a promoter that is directly or indirectly induced by exogenous environmental conditions. In some embodiments, the gene sequence(s) encoding the one or more branched chain ketoacid decarboxylase enzyme(s) is expressed under the control of a promoter that is directly or indirectly induced by low-oxygen or anaerobic conditions, wherein expression of the gene encoding the branched chain ketoacid decarboxylase enzyme is activated under low-oxygen or anaerobic environments, such as the environment of the mammalian gut. In some embodiments, the gene sequence(s) encoding the one or more branched chain ketoacid decarboxylase enzyme(s) is expressed under the control of a promoter that is directly or indirectly induced by inflammatory conditions. Exemplary inducible promoters described herein include oxygen level-dependent promoters (e.g., FNR-inducible promoter), promoters induced by inflammation or an inflammatory response (RNS, ROS promoters), and promoters induced by a metabolite that may or may not be naturally present (e.g., can be exogenously added) in the gut, e.g., arabinose and tetracycline. Examples of inducible promoters include, but are not limited to, an FNR responsive promoter, a P_{araC} promoter, a P_{araBAD} promoter, and a P_{TetR} promoter, each of which are described in more detail herein.

[0191] B. Optimized Branched Chain Amino Acid Deamination Enzymes

[0192] In one embodiment, the branched chain amino acid catabolism enzyme is a branched chain amino acid deamination enzyme. Thus, in some embodiments, the engineered bacteria comprise gene sequence(s) encoding one or more copies of a branched chain amino acid deamination enzyme. In some embodiments, the engineered bacteria comprise gene sequence(s) encoding one, two, three, four, five, six, or more copies of a branched chain amino acid deamination enzyme. The one or more copies of branched chain amino acid deamination enzyme can be one or more copies of the same gene or can be different genes encoding branched chain amino acid deamination enzyme, e.g., gene(s) from a different species or otherwise having a different gene sequence. The one or more copies of branched chain amino acid deamination enzyme can be present in the bacterial chromosome or can be present in one or more plasmids. As used herein, the term “branched chain amino acid deamination enzyme” refers to an enzyme involved in the deamination, or the removal of an amine group, of a branched chain amino acid, which produces a corresponding branched chain alpha-keto acid (e.g., α-ketoisocaproate, α-keto-βmethylvalerate, α-ketoisovalerate). Enzymes involved in the deamination of branched chain amino acids are well known to those of skill in the art. For example, in bacteria, leucine dehydrogenase (LeuDH, leuDH), e.g., derived from Pseudomonas aeruginosa PA01, is capable of catalyzing the reversible deamination of branched chain amino acids, such as leucine, into their corresponding keto-acid counterpart (Baker et al., Structure, 3(7):693-705, 1995).

[0193] In one embodiment, the branched chain amino acid deamination enzyme increases the rate of branched chain amino acid deamination in the cell. In one embodiment, the branched chain amino acid deamination enzyme decreases the level of branched chain amino acid in the cell as compared to the level of its corresponding alpha-keto acid in the cell. In another embodiment, the branched chain amino acid deamination enzyme increases the level of alpha-keto acid in the cell as compared to the level of its corresponding branched chain amino acid in the cell.

[0194] In one embodiment, the branched chain amino acid deamination enzyme is a leucine deamination enzyme. In another embodiment, the branched chain amino acid deamination enzyme is an isoleucine deamination enzyme. In another embodiment, the branched chain amino acid deamination enzyme is a valine deamination enzyme. In another embodiment, the branched chain amino acid deamination enzyme is involved in the deamination of leucine, isoleucine, and valine. In another embodiment, the branched chain amino acid deamination enzyme is involved in the deamination of leucine and valine, isoleucine and valine, or leucine and isoleucine. In some embodiments, the branched chain amino acid deamination enzyme is encoded by a branched chain amino acid deamination enzyme gene derived from a bacterial species. In some embodiments, the branched chain amino acid deamination enzyme is encoded by a branched chain amino acid deamination enzyme gene derived from a non-bacterial species. In some embodiments, the branched chain amino acid deamination enzyme is encoded by a branched chain amino acid deamination enzyme gene derived from a eukaryotic species, e.g., a yeast species or a plant species. In another embodiment, the branched chain amino acid deamination enzyme is encoded by a branched chain amino acid deamination enzyme gene derived from a mammalian species, e.g., human.

[0195] In some embodiments, the branched chain amino acid deamination enzyme is a branched chain amino acid dehydrogenase. Thus, in some embodiments, the engineered bacteria comprise gene sequence(s) encoding one or more copies of a branched chain amino acid dehydrogenase. In some embodiments, the engineered bacteria comprise gene sequence(s) encoding one, two, three, four, five, six, or more copies of a branched chain amino acid dehydrogenase. The one or more copies of branched chain amino acid dehydrogenase can be one or more copies of the same gene or can be different genes encoding branched chain amino acid dehydrogenase, e.g., gene(s) from a different species or otherwise having a different gene sequence. The one or more copies of branched chain amino acid dehydrogenase can be present in the bacterial chromosome or can be present in one or more plasmids.

[0196] In some embodiments, the branched chain amino acid deamination enzyme is leucine dehydrogenase (“leuDH” or “leuDH”). As used herein “leucine dehydrogenase” refers to any polypeptide having enzymatic activity that deaminates leucine to its corresponding ketoacid, alpha-ketoisocaproate (KIC), deaminates valine to its corresponding ketoacid, ketoisovalerate (KIV), and deaminates isoleucine to its corresponding ketoacid, ketomethylvalerate (KMV). In some embodiments, the bacterial cells disclosed herein comprise a heterologous gene encoding a leucine dehydrogenase enzyme and are capable of converting leucine, valine, and/or isoleucine to their respective α-keto acids. For example, the leucine dehydrogenase enzyme LeuDH is capable of metabolizing leucine and a cytosolically active LeuDH should generally exhibit the ability to convert valine, isoleucine, and leucine to ketoisovalerate, ketomethylvalerate, and ketoisocaproate, respectively. Leucine dehydrogenase employs the co-factor NAD+. In some embodiments, leuDH encodes an octamer.

[0197] Multiple distinct leucine dehydrogenases (EC 1.4.1.9) are known in the art and are available from many microorganism sources, including those disclosed herein, as well as from eukaryotic sources (see, for example, Baker et al., Structure, 3(7):693-705, 1995). In some embodiments, the branched chain amino acid deamination enzyme is encoded by at least one gene encoding a branched chain amino acid deamination enzyme derived from a bacterial species. In some embodiments, the branched chain amino acid deamination enzyme is encoded by at least one gene encoding a branched chain amino acid deamination enzyme derived from a non-bacterial species. In some embodiments, the branched chain amino acid deamination enzyme is encoded by at least one gene derived from a eukaryotic species, e.g., a yeast species or a plant species. In another embodiment, the branched chain amino acid deamination enzyme is encoded by at least one gene derived from a mammalian species, e.g., human.

[0198] In one embodiment, the engineered bacteria comprise gene sequence(s) encoding one or more branched chain amino acid dehydrogenase(s), e.g., leucine dehydrogenase enzyme(s). In some embodiments, the branched chain amino acid dehydrogenase, e.g., leucine dehydrogenase enzyme is derived from an organism of the genus or species that includes, but is not limited to, Bacillus, Brevibacillus, Geobacillus, Lysinibacillus, Moorella, Natrialba, Pseudomonas, Sporosarcinia, and Thermoactinomyces. In some embodiments, the leuDH gene is encoded by a gene derived from Bacillus caldolyticus, Bacillus cereus, Bacillus licheniformis, Bacillus megaterium, Bacillus mycoides, Bacillus niger, Bacillus pumilus, Bacillus subtilis, Brevibacillus brevis, Geobacillus stearothermophilus, Lysinibacillus sphaeriscus, Moorella Thermoacetica, Natrialba magadii, Sporosarcina psychorophila, Thermoactinomyces intermedius, Pseudomonas aeruginosa, or Pseudomonas resinovorans. In some embodiments, the branched chain amino acid dehydrogenase enzyme, e.g., leucine dehydrogenase, is encoded by at least one gene derived from Pseudomonas aeruginosa PA01. In some embodiments, the branched chain amino acid dehydrogenase enzyme, e.g., leucine dehydrogenase, is encoded by at least one gene derived from Bacillus cereus. In some embodiments, the at least one gene encoding the branched chain amino acid dehydrogenase enzyme, e.g., leucine dehydrogenase, has been codon-optimized for use in the recombinant bacterial cell. In one embodiment, the at least one gene encoding the branched chain amino acid dehydrogenase enzyme, e.g., leucine dehydrogenase, has been codon-optimized for use in Escherichia coli.

[0199] When a branched chain amino acid dehydrogenase enzyme, e.g., leucine dehydrogenase, is expressed in the recombinant bacterial cells disclosed herein, the bacterial cells catabolize more branched chain amino acid, e.g., leucine, isoleucine, and valine, than unmodified bacteria of the same bacterial subtype under the same conditions (e.g., culture or environmental conditions). Thus, the genetically engineered bacteria comprising at least one heterologous gene encoding a branched chain amino acid dehydrogenase enzyme, e.g., leucine dehydrogenase, may be used to catabolize excess branched chain amino acids, e.g., leucine, valine, and isoleucine, to treat a disease associated with the deamination of a branched chain amino acid, including Maple Syrup Urine Disease (MSUD) as well as other disease provided herein.

[0200] The present disclosure further comprises genes encoding functional fragments of a branched chain amino acid dehydrogenase enzyme, e.g., leucine dehydrogenase, or functional variants of branched chain amino acid dehydrogenase enzyme, e.g., leucine dehydrogenase. The present disclosure encompasses genes encoding a branched chain amino acid dehydrogenase enzyme, e.g., leucine dehydrogenase, comprising amino acids in its sequence that are substantially the same as an amino acid sequence described herein. As used herein, the term “functional fragment thereof” or “functional variant thereof” of a branched chain amino acid dehydrogenase enzyme, e.g., a leucine dehydrogenase, gene relates to a sequence having qualitative biological activity in common with the wild-type branched chain amino acid dehydrogenase, e.g., a leucine dehydrogenase, from which the fragment or variant was derived. For example, a functional fragment or a functional variant of a mutated branched chain amino acid dehydrogenase protein, e.g., a leucine dehydrogenase, is one which retains essentially the same ability to catabolize BCAAs as the branched chain amino acid dehydrogenase protein, e.g., a leucine dehydrogenase, from which the functional fragment or functional variant was derived. For example, a polypeptide having branched chain amino acid dehydrogenase enzyme, e.g., a leucine dehydrogenase, activity may be truncated at the N-terminus or C-terminus and the retention of branched chain amino acid dehydrogenase enzyme, e.g., a leucine dehydrogenase, activity assessed using assays known to those of skill in the art, including the exemplary assays provided herein. In one embodiment, the recombinant bacterial cell disclosed herein comprises a heterologous gene encoding an a branched chain amino acid dehydrogenase enzyme, e.g., a leucine dehydrogenase, functional variant. In another embodiment, the recombinant bacterial cell disclosed herein comprises a heterologous gene encoding a branched chain amino acid dehydrogenase enzyme, e.g., a leucine dehydrogenase, functional fragment.

[0201] Assays for testing the activity of a branched chain amino acid dehydrogenase enzyme functional variant or functional fragment, e.g., a leucine dehydrogenase functional variant or a leucine dehydrogenase functional fragment are well known to one of ordinary skill in the art. For example, leucine dehydrogenase activity can be assessed by expressing the protein, functional variant, or fragment thereof, in a recombinant bacterial cell that lacks endogenous leucine dehydrogenase activity. Also, activity can be assessed using the enzymatic assay methods as described by Soda et al. (Biochem. Biophys. Res. Commun., 44:931, 1971), and Ohshima et al. (J. Biol. Chem., 253:5719, 1978), the entire contents of each of which are expressly incorporated herein by reference.

[0202] In some embodiments, the at least one gene encoding a branched chain amino acid dehydrogenase enzyme, e.g., leucine dehydrogenase is mutagenized, mutants exhibiting increased activity are selected, and the mutagenized gene(s) encoding the branched chain amino acid dehydrogenase enzyme, e.g., leucine dehydrogenase, are isolated and inserted into the bacterial cell. In some embodiments, the at least one gene encoding a branched chain amino acid dehydrogenase enzyme, e.g., leucine dehydrogenase is mutagenized, mutants exhibiting decreased activity are selected, and the mutagenized gene(s) encoding the branched chain amino acid dehydrogenase enzyme, e.g., leucine dehydrogenase, are isolated and inserted into the bacterial cell. The gene comprising the modifications described herein may be present on a plasmid or chromosome.

[0203] In some embodiments, the engineered bacteria comprise gene sequence(s) encoding at least one branched chain amino acid dehydrogenase enzyme, e.g., leucine dehydrogenase, and further comprise gene sequence encoding one or more polypeptides selected from other branched chain amino acid catabolism enzyme(s), BCAA transporter(s), and BCAA binding protein(s). Thus, in some embodiments, the at least one branched chain amino acid dehydrogenase enzyme, e.g., leucine dehydrogenase, is coexpressed with an additional branched chain amino acid deamination enzyme, e.g., branched chain amino acid dehydrogenase, a branched chain aminotransferase, and/or amino acid oxidase (also known as amino acid deaminase). For example, in some embodiments, the branched chain amino acid dehydrogenase enzyme, e.g., leucine dehydrogenase, is coexpressed with one or more other branched chain amino acid dehydrogenase enzyme(s).

[0204] In some embodiments, the branched chain amino acid dehydrogenase enzyme, e.g., leucine dehydrogenase, is coexpressed with one or more other branched chain amino acid catabolism enzyme(s), for example, a ketoacid decarboxylase, such as kivD. In some embodiments, the branched chain amino acid dehydrogenase enzyme, e.g., leucine dehydrogenase, is coexpressed with one or more other branched chain amino acid catabolism enzyme(s), for example, a branched chain alcohol dehydrogenase, such as adh2. In other embodiments, the branched chain amino acid dehydrogenase enzyme, e.g., leucine dehydrogenase, is coexpressed with a second branched chain amino acid catabolism enzyme, for example, kivD, and a branched chain alcohol dehydrogenase, for example, adh2. In some embodiments, the engineered bacteria comprise gene sequence(s) encoding at least one branched chain amino acid dehydrogenase enzyme, e.g., leucine dehydrogenase enzyme, and gene sequence(s) encoding one or more keto-acid decarboxylase(s) (e.g., kivD). In some embodiments, the engineered bacteria comprise gene sequence(s) encoding at least one branched chain amino acid dehydrogenase enzyme, e.g., leucine dehydrogenase enzyme, and gene sequence(s) encoding one or more alcohol dehydrogenase(s) (e.g., adh2).

[0205] In some embodiments, the at least one branched chain amino acid dehydrogenase enzyme, e.g., leucine dehydrogenase enzyme is coexpressed with one or more BCAA transporter(s), for example, a high affinity leucine transporter, e.g., LivKHMGF and/or the low affinity BCAA transporter BmQ. In some embodiments, the engineered bacteria comprise gene sequence(s) encoding at least one branched chain amino acid dehydrogenase enzyme, e.g., leucine dehydrogenase enzyme and gene sequence(s) encoding one or more BCAA transporter(s) (e.g., livKHMGF and/or brnQ).

[0206] In some embodiments, the engineered bacteria comprise gene sequence(s) encoding at least one branched chain amino acid dehydrogenase enzyme, e.g., leucine dehydrogenase enzyme, and genetic modification that reduces export of a branched chain amino acid, e.g., a genetic mutation in a leuE gene or promoter thereof. In one embodiment, the engineered bacteria comprise gene sequence(s) encoding at least one branched chain amino acid dehydrogenase enzyme, e.g., leucine dehydrogenase enzyme, and a genetic modification that reduces or eliminates branched chain amino acid synthesis, e.g., a genetic mutation in a ilvC gene or promoter thereof.

[0207] In some embodiments, the gene sequence(s) encoding the one or more branched chain amino acid dehydrogenase enzyme(s), e.g., leucine dehydrogenase enzyme(s) is expressed under the control of a constitutive promoter. In some embodiments, the gene sequence(s) encoding the one or more branched chain amino acid dehydrogenase enzyme(s), e.g., leucine dehydrogenase enzyme(s) is expressed under the control of an inducible promoter. In some embodiments, the gene sequence(s) encoding the one or more branched chain amino acid dehydrogenase enzyme(s), e.g., leucine dehydrogenase enzyme(s) is expressed under the control of a promoter that is directly or indirectly induced by exogenous environmental conditions. In some embodiments, the gene sequence(s) encoding the one or more branched chain amino acid dehydrogenase enzyme(s), e.g., leucine dehydrogenase enzyme(s) is expressed under the control of a promoter that is directly or indirectly induced by low-oxygen or anaerobic conditions, wherein expression of the gene encoding the branched chain amino acid dehydrogenase enzyme, e.g., leucine dehydrogenase enzyme is activated under low-oxygen or anaerobic environments, such as the environment of the mammalian gut. In some embodiments, the gene sequence(s) encoding the one or more branched chain amino acid dehydrogenase enzyme(s), e.g., leucine dehydrogenase enzyme(s) is expressed under the control of a promoter that is directly or indirectly induced by inflammatory conditions. Exemplary inducible promoters described herein include oxygen level-dependent promoters (e.g., FNR-inducible promoter), promoters induced by inflammation or an inflammatory response (RNS, ROS promoters), and promoters induced by a metabolite that may or may not be naturally present (e.g., can be exogenously added) in the gut, e.g., arabinose and tetracycline. Examples of inducible promoters include, but are not limited to, an FNR responsive promoter, a P_{araC} promoter, a P_{araBAD} promoter, and a P_{TetR} promoter, each of which are described in more detail herein.

[0208] In some embodiments, the branched chain amino acid dehydrogenase is leucine dehydrogenase. The present disclosure further comprises genes encoding functional fragments of leucine dehydrogenase, or functional variants of leucine dehydrogenase. The present disclosure encompasses genes encoding leucine dehydrogenase, comprising amino acids in its sequence that are substantially the same as an amino acid sequence described herein.

[0209] In some embodiments, the at least one leuDH gene has at least about 80% identity with any one of SEQ ID NOs:49-72. Accordingly, in one embodiment, the at least one leuDH gene has at least about 90% identity with any one of SEQ ID NOs:49-72. Accordingly, in one embodiment, the at least one leuDH gene has at least about 95% identity with any one of SEQ ID NOs:49-72. Accordingly, in one embodiment, the at least one leuDH gene has at least about 85%, 86%, 87%, 88%, 89%, 90%, 91%, 92%, 93%, 94%, 95%, 96%, 97%, 98%, or 99% identity with any one of SEQ ID NOs:49-72. In another embodiment, the at least one leuDH gene comprises any one of SEQ ID NOs:49-72. In yet another embodiment the at least one leuDH gene consists of any one of SEQ ID NOs:49-72.

[0210] C. Optimized Alcohol Dehydrogenase Enzymes

[0211] In some embodiments, wherein a branched chain amino acid catabolism enzyme is used to convert a ketoacid to its corresponding aldehyde, the recombinant bacterial cells may further comprise an alcohol dehydrogenase enzyme in order to convert the branched chain amino acid-derived aldehyde to its respective alcohol. In some embodiments, the engineered bacteria comprise gene sequence(s) encoding one or more copies of an alcohol dehydrogenase. In some embodiments, the engineered bacteria comprise gene sequence(s) encoding one, two, three, four, five, six, or more copies of an alcohol dehydrogenase. The one or more copies of an alcohol dehydrogenase can be one or more copies of the same gene or can be different genes encoding alcohol dehydrogenase, e.g., gene(s) from a different species or otherwise having a different gene sequence. The one or more copies of alcohol dehydrogenase can be present in the bacterial chromosome or can be present in one or more plasmids. As used herein, “alcohol dehydrogenase” refers to any polypeptide having enzymatic activity that catalyzes the conversion of a branched chain amino acid-derived aldehyde, e.g., isovaleraldehyde, isobutyraldehyde, and 2-methylbutyraldehyde, into its respective alcohol, e.g., isopentanol, isobutanol, and 2-methylbutanol.

[0212] In general, alcohol dehydrogenases (EC 1.1.1.1) belong to a group of dehydrogenase enzymes that facilitate the interconversion between alcohols and aldehydes or ketones with the reduction of nicotinamide adenine dinucleotide (NAD+ to NADH). Multiple distinct alcohol dehydrogenases are known in the art and are available from many microorganism sources, including those disclosed herein, as well as eukaryotic and plant sources (see, for example, Bennetzen et al., J. Biol. Chem., 257(6):3018-25, 1982 and Teng et al., Human Genetics, 53(1):87-90, 1979, the entire contents of each of which are expressly incorporated herein by reference).

[0213] In some embodiments, the alcohol dehydrogenase is encoded by at least one gene derived from a bacterial species. In some embodiments, the alcohol dehydrogenase is encoded by at least one gene derived from a non-bacterial species. In some embodiments, the alcohol dehydrogenase is encoded by at least one gene derived from a eukaryotic species, e.g., a yeast species or a plant species. In another embodiment, the alcohol dehydrogenase is encoded by at least one gene derived from a mammalian species, e.g., human.

[0214] In one embodiment, the at least one gene encoding the alcohol dehydrogenase is derived from an organism of the genus or species that includes, but is not limited to, Acetinobacter, Azospirillum, Bacillus, Bacteroides, Bifidobacterium, Brevibacteria, Burkholderia, Citrobacter, Clostridium, Corynebacterium, Cronobacter, Enterobacter, Enterococcus, Erwinia, Helicobacter, Klebsiella, Lactobacillus, Lactococcus, Leishmania, Listeria, Macrococcus, Mycobacterium, Nakamurella, Nasonia, Nostoc, Pantoea, Pectobacterium, Proteus, Pseudomonas, Psychrobacter, Ralstonia, Saccharomyces, Salmonella, Sarcina, Serratia, Staphylococcus, Streptococcus, and Yersinia, e.g., Acetinobacter radioresistens, Acetinobacter baumannii, Acetinobacter calcoaceticus, Azospirillum brasilense, Bacillus anthracis, Bacillus cereus, Bacillus coagulans, Bacillus megaterium, Bacillus subtilis, Bacillus thuringiensis, Bacteroides fragilis, Bacteroides subtilis, Bacteroides thetaiotaomicron, Bifidobacterium bifdum, Bifidobacterium infantis, Bifdobacterium lactis, Bifidobacterium longum, Burkholderia xenovorans, Citrobacter youngae, Citrobacter koseri, Citrobacter rodentium, Clostridium acetobutylicum, Clostridium butyricum, Corynebacterium aurimucosum, Corynebacterium kroppenstedtii, Corynebacterium striatum, Cronobacter sakazakii, Cronobacter turicensis, Enterobacter cloacae, Enterobacter cancerogenus, Enterococcus faecium, Enterococcus faecalis, Erwinia amylovara, Erwinia pyrifoliae, Erwinia tasmaniensis, Helicobacter mustelae, Klebsiella pneumonia, Klebsiella variicola, Lactobacillus acidophilus, Lactobacillus bulgaricus, Lactobacillus casei, Lactobacillus johnsonii, Lactobacillus paracasei, Lactobacillus plantarum, Lactobacillus reuteri, Lactobacillus rhamnosus, Lactococcus lactis, Leishmania infantum, Leishmania major, Leishmania brazilensis, Listeria grayi, Macrococcus caseolyticus, Mycobacterium avium, Mycobacterium intracellulare, Mycobacterium kansasii, Mycobacterium leprae, Mycobacterium marinum, Mycobacterium smegmatis, Mycobacterium tuberculosis, Mycobacterium ulcerans, Nakamurella multipartita, Nasonia vitipennis, Nostoc punctiforme, Pantoea ananatis, Pantoea agglomerans, Pectobacterium atrosepticum, Pectobacterium carotovorum, Pseudomonas putida, Pseudomonas aeruginosa, Psychrobacter articus, Proteus vulgaris, Psychrobacter cryohalolentis, Ralstonia eutropha, Saccharomyces boulardii, Salmonella enterica, Sarcina ventriculi, Serratia odorifera, Serratia proteamaculans, Staphylococcus aerus, Staphylococcus capitis, Staphylococcys carnosus, Staphylococcus epidermidis, Staphylococcus hominis, Staphylococcus haemolyticus, Staphylococcus lugdunensis, Staphylococcus saprophyticus, Staphylococcus warneri, Streptococcus faecalis, Yersinia enterocolitica, Yersinia mollaretii, Yersinia kristensenii, Yersinia rohdei, and Yersinia aldovae. In some embodiments, the alcohol dehydrogenase is adh2. In some embodiments, the alcohol dehydrogenase is encoded by at least one gene derived from Saccharomyces cerevisiae. In another embodiment, the alcohol dehydrogenase is encoded by at least one gene derived from E. coli. In another embodiment, the alcohol dehydrogenase is encoded by at least one gene derived from Oryza sativa. In another embodiment, the alcohol dehydrogenase is encoded by at least one gene derived from Penicillium brasilianum. In another embodiment, the alcohol dehydrogenase is encoded by at least one gene derived from Bifidobacterium longum.

[0215] Accordingly, in some embodiments, the adh2 gene has at least about 80% identity with the entire sequence of any one of SEQ ID NOs: 97-120. Accordingly, in one embodiment, the adh2 gene has at least about 90% identity with the entire sequence of any one of SEQ ID NOs: 97-120. Accordingly, in one embodiment, the adh2 gene has at least about 95% identity with the entire sequence of any one of SEQ ID NOs: 97-120. Accordingly, in one embodiment, the adh2 gene has at least about 85%, 86%, 87%, 88%, 89%, 90%, 91%, 92%, 93%, 94%, 95%, 96%, 97%, 98%, or 99% identity with the entire sequence of any one of SEQ ID NOs: 97-120. In another embodiment, the adh2 gene comprises the sequence of any one of SEQ ID NOs: 97-120. In yet another embodiment, the adh2 gene consists of any one of SEQ ID NOs: 97-120.

[0216] In some embodiments, the at least one gene encoding the alcohol dehydrogenase has been codon-optimized for use in the recombinant bacterial cell. In some embodiments, the at least one gene encoding the alcohol dehydrogenase has been codon-optimized for use in Escherichia coli.

[0217] When an alcohol dehydrogenase is expressed in the recombinant bacterial cells disclosed herein, the bacterial cells convert more branched chain amino acid-derived aldehydes to their respective alcohols than unmodified bacteria of the same bacterial subtype under the same conditions (e.g., culture or environmental conditions). Thus, the genetically engineered bacteria comprising at least one heterologous gene encoding an alcohol dehydrogenase may be used to catabolize excess branched chain amino acid-derived aldehydes, e.g., isovaleraldehyde, to treat a disease associated with a branched chain amino acid, including Maple Syrup Urine Disease (MSUD).

[0218] The present disclosure encompasses genes encoding an alcohol dehydrogenase comprising amino acids in its sequence that are substantially the same as an amino acid sequence described herein. The present disclosure further comprises genes encoding functional fragments of an alcohol dehydrogenase or functional variants of an alcohol dehydrogenase. As used herein, the term “functional fragment thereof” or “functional variant thereof” of an alcohol dehydrogenase gene relates to a sequence having qualitative biological activity in common with the wild-type alcohol dehydrogenase, from which the fragment or variant was derived. For example, a functional fragment or a functional variant of a mutated alcohol dehydrogenase is one which retains essentially the same ability to catabolize BCAAs as alcohol dehydrogenase from which the functional fragment or functional variant was derived. For example, a polypeptide having alcohol dehydrogenase activity may be truncated at the N-terminus or C-terminus and the retention alcohol dehydrogenase activity assessed using assays known to those of skill in the art, including the exemplary assays provided herein. In one embodiment, the recombinant bacterial cell disclosed herein comprises a heterologous gene encoding an alcohol dehydrogenase functional variant. In another embodiment, the recombinant bacterial cell disclosed herein comprises a heterologous gene encoding alcohol dehydrogenase functional fragment.

[0219] In some embodiments, the at least one gene encoding an alcohol dehydrogenase is mutagenized, mutants exhibiting increased activity are selected, and the mutagenized gene(s) encoding the alcohol dehydrogenase are isolated and inserted into the bacterial cell. In some embodiments, the at least one gene encoding the alcohol dehydrogenase is mutagenized, mutants exhibiting decreased activity are selected, and the mutagenized gene(s) encoding the alcohol dehydrogenase are isolated and inserted into the bacterial cell. The gene comprising the modifications described herein may be present on a plasmid or chromosome.

[0220] Assays for testing the activity of an alcohol dehydrogenase, an alcohol dehydrogenase functional variant, or an alcohol dehydrogenase functional fragment are well known to one of ordinary skill in the art. For example, alcohol dehydrogenase activity can be assessed by expressing the protein, functional variant, or fragment thereof, in a recombinant bacterial cell that lacks endogenous alcohol dehydrogenase activity. Also, activity can be assessed using the enzymatic assay methods as described by Kagi et al. (J. Biol. Chem., 235:3188-92, 1960), and Walker (Biochem. Educ., 20(1):42-43, 1992).

[0221] In some embodiments, the alcohol dehydrogenase is co-expressed with an additional branched chain amino acid catabolism enzyme. In some embodiments, the alcohol dehydrogenase is co-expressed with one or more keto-acid decarboxylase enzyme(s), e.g., kivD. In some embodiments, the alcohol dehydrogenase is co-expressed with one or more keto-acid decarboxylase enzymes, e.g., kivD and one or more other alcohol dehydrogenase enzymes.

[0222] In some embodiments, the at least one alcohol dehydrogenase enzyme is coexpressed with one or more BCAA transporter(s), for example, a high affinity leucine transporter, e.g., LivKHMGF and/or a low affinity BCAA transporter, e.g., BrnQ.

[0223] In some embodiments, the engineered bacteria comprise gene sequence(s) encoding at least one alcohol dehydrogenase enzyme and genetic modification that reduces export of a branched chain amino acid, e.g., a genetic mutation in a leuE gene or promoter thereof. In one embodiment, the engineered bacteria comprise gene sequence(s) encoding at least one alcohol dehydrogenase enzyme and a genetic modification that reduces or eliminates branched chain amino acid synthesis, e.g., a genetic mutation in a ilvC gene or promoter thereof.

[0224] In some embodiments, the engineered bacteria comprise gene sequence(s) encoding at least one alcohol dehydrogenase enzyme and further comprise gene sequence encoding one or more polypeptides selected from other branched chain amino acid catabolism enzyme(s), BCAA transporter(s), and BCAA binding protein(s). In some embodiments, the engineered bacteria comprise gene sequence(s) encoding at least one alcohol dehydrogenase and gene sequence(s) encoding one or more branched chain amino acid dehydrogenase(s) (e.g., leuDH). In some embodiments, the engineered bacteria comprise gene sequence(s) encoding at least one alcohol dehydrogenase and gene sequence(s) encoding one or more keto-acid decarboxylase enzyme(s), e.g., kivD. In some embodiments, the engineered bacteria comprise gene sequence(s) encoding at least one alcohol dehydrogenase and gene sequence(s) encoding one or more other alcohol dehydrogenase(s) (e.g., adh2).

[0225] In some embodiments, the engineered bacteria comprise gene sequence(s) encoding at least one alcohol dehydrogenase and genetic modification that reduces export of a branched chain amino acid, e.g., a genetic mutation in a leuE gene or promoter thereof. In one embodiment, the engineered bacteria comprise gene sequence(s) encoding at least one alcohol dehydrogenase and a genetic modification that reduces or eliminates branched chain amino acid synthesis, e.g., a genetic mutation in a ilvC gene or promoter thereof.

[0226] In one embodiment, the at least one gene encoding the branched chain amino acid alcohol dehydrogenase comprises the adh2 gene. In one embodiment, the adh2 gene has at least about 80% identity with the sequence of any one of SEQ ID NOs:97-120. In one embodiment, the adh2 gene has at least about 90% identity with the sequence of any one of SEQ ID NOs:97-120. In one embodiment, the adh2 gene has at least about 95% identity with the sequence of any one of SEQ ID NOs:97-120. In one embodiment, the adh2 gene has at least about 85%, 86%, 87%, 88%, 89%, 90%, 91%, 92%, 93%, 94%, 95%, 96%, 97%, 98%, or 99% identity with the sequence of any one of SEQ ID NOs:97-120. In another embodiment, the adh2 gene comprises the sequence of any one of SEQ ID NOs:97-120. In yet another embodiment, the adh2 gene consists of the sequence of any one of SEQ ID NOs:97-120.

[0227] In any of these embodiments, the alcohol dehydrogenase is coexpressed with one or more branched chain amino acid catabolism enzymes, e.g., leuDH, and or kivD, each of which are described in more detail herein. In other embodiments, the alcohol dehydrogenase is further coexpressed with a transporter of a branched chain amino acid, e.g., brnQ, and/or a binding protein of a BCAA.

[0228] In some embodiments, the gene sequence(s) encoding the one or more alcohol dehydrogenase is expressed under the control of a constitutive promoter. In some embodiments, the gene sequence(s) encoding the one or more b alcohol dehydrogenase is expressed under the control of an inducible promoter. In some embodiments, the gene sequence(s) encoding the one or more alcohol dehydrogenase is expressed under the control of a promoter that is directly or indirectly induced by exogenous environmental conditions. In some embodiments, the gene sequence(s) encoding the one or more alcohol dehydrogenase is expressed under the control of a promoter that is directly or indirectly induced by low-oxygen or anaerobic conditions, wherein expression of the gene encoding the alcohol dehydrogenase is activated under low-oxygen or anaerobic environments, such as the environment of the mammalian gut. In some embodiments, the gene sequence(s) encoding the one or more alcohol dehydrogenase is expressed under the control of a promoter that is directly or indirectly induced by inflammatory conditions. Exemplary inducible promoters described herein include oxygen level-dependent promoters (e.g., FNR-inducible promoter), promoters induced by inflammation or an inflammatory response (RNS, ROS promoters), and promoters induced by a metabolite that may or may not be naturally present (e.g., can be exogenously added) in the gut, e.g., arabinose and tetracycline. Examples of inducible promoters include, but are not limited to, an FNR responsive promoter, a P_{araC} promoter, a P_{araBAD} promoter, and a P_{TetR} promoter, each of which are described in more detail herein.

[0229] Transporter (Importer) of a Branched Chain Amino Acid

[0230] In some embodiments, a recombinant bacterial cell disclosed herein comprising gene sequence(s) encoding at least one branched chain amino acid catabolism enzyme (e.g., in some embodiments expressed on a high-copy plasmid) does not increase branched chain amino acid catabolism or decrease branched chain amino acid levels in the absence of a heterologous transporter (importer) of the branched chain amino acid, e.g., leucine, and additional copies of a native importer of the branched chain amino acid, e.g., livKHMGF. It has been surprisingly discovered that in some embodiments, the rate-limiting step of branched chain amino acid catabolism, e.g., leucine catabolism, is not expression of a branched chain amino acid catabolism enzyme, but rather availability of the branched chain amino acid, e.g., leucine. Thus, in some embodiments, it may be advantageous to increase branched chain amino acid transport, e.g., leucine transport, into the cell, thereby enhancing branched chain amino acid catabolism. Surprisingly, in conjunction with overexpression of a transporter of a branched chain amino acid, e.g., LivKHMGF, even low copy number plasmids comprising a gene encoding at least one branched chain amino acid catabolism enzyme are capable of almost completely eliminating a branched chain amino acid, e.g., leucine, from a sample. Furthermore, in some embodiments that incorporate a transporter of a branched chain amino acid into the recombinant bacterial cell, there may be additional advantages to using a low-copy plasmid comprising the gene encoding the branched chain amino acid catabolism enzyme in conjunction in order to enhance the stability of expression of the branched chain amino acid catabolism enzyme, while maintaining high branched chain amino acid catabolism and to reduce negative selection pressure on the transformed bacterium. In alternate embodiments, the branched chain amino acid transporter is used in conjunction with a high-copy plasmid. In alternate embodiments, the gene(s) at least one BCAA catabolism enzyme is integrated in the bacterial chromosome.

[0231] In some embodiments, in which the engineered bacterial cell comprises gene sequence encoding a branched amino acid transporter, the bacterial cell comprises gene sequence encoding one branched chain amino acid catabolism enzyme. In other embodiments, in which the engineered bacterial cell comprises gene sequence encoding a branched amino acid transporter, the bacterial cell comprises gene sequence(s) encoding two branched chain amino acid catabolism enzymes. In other embodiments, in which the engineered bacterial cell comprises gene sequence encoding a branched amino acid transporter, the bacterial cell comprises gene sequence(s) encoding three or more branched chain amino acid catabolism enzymes. In other embodiments, in which the engineered bacterial cell comprises gene sequence encoding a branched amino acid transporter, the bacterial cell comprises gene sequence(s) encoding four, five, six or more branched chain amino acid catabolism enzymes.

[0232] In some embodiments, the branched chain amino acid catabolism enzyme converts a branched chain amino acid, e.g., leucine, valine, isoleucine, into its corresponding branched chain alpha-keto acid counterpart. In other embodiments, the branched chain amino acid catabolism enzyme converts a branched chain alpha-keto acid, e.g., alpha-ketoisocaproate, alpha-keto-beta-methylvalerate, alpha-ketoisovalerate into its corresponding aldehyde. In other embodiments, the branched chain amino acid catabolism enzyme converts a branched chain alpha-keto acid, e.g., alpha-ketoisocaproate, alpha keto-beta-methylvalerate, alpha-ketoisovalerate into its corresponding acetyl-CoA, e.g., isovaleryl-CoA, alpha-methylbutyryl-CoA, isobutyl-CoA. In other embodiments, the branched chain amino acid catabolism enzyme converts a branched chain aldehyde to its corresponding alcohol. In another embodiment, the branched chain amino acid catabolism enzyme converts a branched chain aldehyde to its corresponding carboxylic acid.

[0233] In some embodiments, the engineered bacteria comprising gene sequence(s) encoding one or more BCAA transporter(s), further comprise gene sequence(s) encoding one or more BCAA catabolism enzymes, e.g., leuDH. In some embodiments, the engineered bacteria comprising gene sequence(s) encoding one or more BCAA transporter(s), further comprise gene sequence(s) encoding one or more BCAA catabolism enzymes, e.g., leuDH, and gene sequence(s) encoding one or more keto acid decarboxylase enzyme(s), e.g., kivD. In any of these embodiments, the engineered bacteria also comprise a genetic modification that reduces export of a branched chain amino acid, e.g., a genetic mutation in a leuE gene or promoter thereof. In any of these embodiments, the bacteria also comprise a genetic modification that reduces or eliminates branched chain amino acid synthesis, e.g., a genetic mutation in a ilvC gene or promoter thereof.

[0234] In one embodiment, the bacterial cell comprises gene sequence encoding one or more transporter(s) of branched chain amino acids, gene sequence(s) encoding one or more branched chain amino acid catabolism enzyme(s), and at least one genetic modification that reduces export of a branched chain amino acid, e.g., genetic modification in a leuE gene or promoter thereof. In one embodiment, the bacterial cell comprises gene sequence encoding one or more transporter(s) of branched chain amino acids, gene sequence(s) encoding one or more branched chain amino acid catabolism enzyme(s), and at least one genetic modification that reduces or eliminates branched chain amino acid synthesis, e.g., a genetic mutation in a ilvC gene or promoter thereof. In one embodiment, the bacterial cell comprises gene sequence encoding one or more transporter(s) of branched chain amino acids, gene sequence(s) encoding one or more branched chain amino acid catabolism enzyme(s), at least one genetic modification that reduces export of a branched chain amino acid., and at least one genetic modification that reduces or eliminates branched chain amino acid synthesis.

[0235] The uptake of branched chain amino acids into bacterial cells is mediated by proteins well known to those of skill in the art. For example, two well characterized BCAA transport systems have been characterized in several bacteria, including Escherichia coli. BCAAs are transported by two systems into bacterial cells (i.e., imported), the osmotic-shock-sensitive systems designated LIV-I and LS (leucine-specific), and by an osmotic-shock resistant system, BrnQ, formerly known as LIV-II (see Adams et al., J. Biol. Chem. 265:11436-43 (1990); Anderson and Oxender, J. Bacteriol. 130:384-92 (1977); Anderson and Oxender, J. Bacteriol. 136:168-74 (1978); Haney et al., J. Bacteriol. 174:108-15 (1992); Landick and Oxender, J. Biol. Chem. 260:8257-61 (1985); Nazos et al., J. Bacteriol. 166:565-73 (1986); Nazos et al., J. Bacteriol. 163:1196-202 (1985); Oxender et al., Proc. Natl. Acad. Sci. USA 77:1412-16 (1980); Quay et al., J. Bacteriol. 129:1257-65 (1977); Rahmanian et al., J. Bacteriol. 116:1258-66 (1973); Wood, J. Biol. Chem. 250:4477-85 (1975); Guardiola et al., J. Bacteriol. 117:393-405 (1974); Guardiola and Iaccarino, J. Bacteriol. 108:1034-44 (1971); Ohnishi et al., Jpn. J. Genet. 63:343-57)(1988); Yamato and Anraku, J. Bacteriol. 144:36-44 (1980); and Yamato et al., J. Bacteriol. 138:24-32 (1979)). Transport by the BrnQ system is mediated by a single membrane protein. Transport mediated by the LIV-I system is dependent on the substrate binding protein LivJ (also known as LIV-BP), while transport mediated by LS system is mediated by the substrate binding protein LivK (also known as LS-BP). LivJ is encoded by the livJ gene, and binds isoleucine, leucine and valine with K_{d} values of ˜10⁻⁶ and ˜10⁻⁷ M, while LivK is encoded by the livK gene, and binds leucine with a K_{d} value of ˜10⁻⁶ M (See Landick and Oxender, J. Biol. Chem. 260:8257-61 (1985)). Both LivJ and LivK interact with the inner membrane components LivHMGF to enable ATP-hydrolysis-coupled transport of their substrates into the cell, forming the LIV-I and LS transport systems, respectively. The LIV-I system transports leucine, isoleucine and valine, and to a lesser extent serine threonine and alanine, whereas the LS system only transports leucine. The six genes encoding the E. coli LIV-I and LS systems are organized into two transcriptional units, with livKHMGF transcribed as a single operon, and livJ transcribed separately. LivKHMGF is an ABC transporter comprised of five subunits, including LivK, which is a periplasmic amino acid binding protein, LivHM, which are membrane subunits, and LivGF, which are ATP-binding subunits. The Escherichia coli liv genes can be grouped according to protein function, with the livJ and livK genes encoding periplasmic binding proteins with the binding affinities described above, the livH and livM genes encoding inner membrane permeases, and the livG and livF genes encoding cytoplasmic ATPases.

[0236] BrnQ is a branched chain amino acid transporter highly similar to the Salmonella typhimurium BrnQ branched chain amino acid transporter (Ohnishi et al., Cloning and nucleotide sequence of the brnQ gene, the structural gene for a membrane-associated component of the LIV-II transport system for branched-chain amino acids in Salmonella typhimurium. Jpn J Genet. 1988 August63(4):343-57) and corresponds to the Liv-II branched chain amino acid transport system in E. coli, which has been shown to transport leucine, valine, and isoleucine (Guardiola et al., Mutations affecting the different transport systems for isoleucine, leucine, and valine in Escherichia coli K-12. J Bacteriol. 1974 February; 117(2):393-405), Guardiola and Oxender, Genetic separation of high- and low-affinity transport systems for branched-chain amino acids in Escherichia coli K-12. J Bacteriol. 1978 October; 136(1):168-74., Anderson and Oxender, Genetic separation of high- and low-affinity transport systems for branched-chain amino acids in Escherichia coli K-12 J Bacteriol. 1978 October; 136(1):168-74.78). BrnQ is a member of the LIVCS family of branched chain amino acid transporters and likely functions as a sodium/branched chain amino acid symporter.

[0237] Branched chain amino acid transporters, e.g., leucine importers, may be expressed or modified in the bacteria disclosed herein in order to enhance branched chain amino acid, e.g., leucine, transport into the cell. For example, the gene sequence(s) for endogenous transporter(s) may be modified (e.g., codon-optimized and/or expressed by a strong promoter) to overexpress the transporter and/or additional copies of the transporter may be added. Alternatively, or additionally, gene sequence(s) for one or more non-endogenous or non-native transporters may be expressed in the bacterial cell. Specifically, when the transporter of a branched chain amino acid is expressed in the recombinant bacterial cells disclosed herein, the bacterial cells import more branched chain amino acids into the cell when the transporter is expressed than unmodified bacteria of the same bacterial subtype under the same conditions (not expressing the transporter). Thus, in some embodiments, the engineered bacteria comprise gene sequence(s) encoding one or more transporter(s) of a branched chain amino acid, e.g., leucine, which may be used to import branched chain amino acids, e.g., leucine, into the bacteria so that any gene encoding a branched chain amino acid catabolism enzyme expressed in the bacteria catabolize the branched chain amino acid, e.g., leucine, to treat diseases associated with the catabolism of branched chain amino acids, such as Maple Syrup Urine Disease (MSUD). In one embodiment, the bacterial cell comprises gene sequence(s) encoding one or more transporter(s) of branched chain amino acids. In one embodiment, the bacterial cell comprises gene sequence(s) encoding one or more transporter(s) of branched chain amino acids and a gene sequence(s) encoding one or more branched chain amino acid catabolism enzyme(s). In one embodiment, the bacterial cell comprises gene sequence(s) encoding a one or more transporter(s) of branched chain amino acids and a genetic modification that reduces export of a branched chain amino acid, e.g., a genetic mutation in a leuE gene or promoter thereof. In one embodiment, the bacterial cell comprises gene sequence(s) encoding one or more transporter(s) of branched chain amino acids and a genetic modification that reduces or eliminates branched chain amino acid synthesis, e.g., a genetic mutation in a ilvC gene or promoter thereof. In one embodiment, the bacterial cell comprises gene sequence encoding one or more transporter(s) of branched chain amino acids, gene sequence(s) encoding one or more branched chain amino acid catabolism enzyme(s), and at least one genetic modification that reduces export of a branched chain amino acid. In one embodiment, the bacterial cell comprises gene sequence encoding one or more transporter(s) of branched chain amino acids, gene sequence(s) encoding one or more branched chain amino acid catabolism enzyme(s), and at least one genetic modification that reduces or eliminates branched chain amino acid synthesis. In one embodiment, the bacterial cell comprises gene sequence encoding one or more transporter(s) of branched chain amino acids, gene sequence(s) encoding one or more branched chain amino acid catabolism enzyme(s), at least one genetic modification that reduces export of a branched chain amino acid., and at least one genetic modification that reduces or eliminates branched chain amino acid synthesis. In any of these embodiments, the engineered bacterial cell may further comprise gene sequence encoding livJ, which brings BCAA into the bacterial cell. In any of these embodiments, the transporter may be a native transporter, e.g., the bacteria may comprise additional copies of the native transporter. In any of these embodiments, the transporter may be a non-native transporter. In any of these embodiments, the transporter may be LivKHMGF. In any of these embodiments, the transporter may be BrnQ. In any of these embodiments, the bacterial cell may comprise gene sequence(s) encoding LivKHMGF and BrnQ.

[0238] In some embodiments, the engineered bacteria comprise gene sequence(s) encoding one or more BCAA catabolism enzyme(s) and gene sequence(s) encoding one or more BCAA transporters, in which the gene sequence(s) encoding one or more BCAA catabolism enzyme(s) and the gene sequence(s) encoding one or more transporter(s) are operably linked to different copies of the same promoter. In some embodiments, the engineered bacteria comprise gene sequence(s) encoding one or more BCAA catabolism enzyme(s) and gene sequence(s) encoding one or more BCAA transporters, in which the gene sequence(s) encoding one or more BCAA catabolism enzyme(s) and the gene sequence(s) encoding one or more transporter(s) are operably linked to different promoters. Thus, in some embodiments, the disclosure provides a bacterial cell that comprises gene sequence(s) encoding one or more branched chain amino acid catabolism enzyme(s) operably linked to a first promoter and gene sequence encoding one or more transporter(s) of a branched chain amino acid, e.g., leucine. In some embodiments, the disclosure provides a bacterial cell that comprises gene sequence(s) encoding one or more transporters of a branched chain amino acid operably linked to the first promoter. In other embodiments, the disclosure provides a bacterial cell impressing gene sequence(s) encoding one or more branched chain amino acid catabolism enzyme(s) operably linked to a first promoter and gene sequence(s) encoding one or more transporter(s) of a branched chain amino acid operably linked to a second promoter. In one embodiment, the first promoter and the second promoter are separate copies of the same promoter. In another embodiment, the first promoter and the second promoter are different promoters. In one embodiment, the first promoter and the second promoter are inducible promoters. In another embodiment, the first promoter is an inducible promoter and the second promoter is a constitutive promoter. In some embodiments, the gene sequence(s) encoding the one or more BCAA catabolism enzymes and the gene sequence(s) encoding the one or more transporters is expressed under the control of a constitutive promoter. In some embodiments, the gene sequence(s) encoding the one or more BCAA catabolism enzymes and the gene sequence(s) encoding the one or more BCAA transporters is expressed under the control of an inducible promoter. In some embodiments, the gene sequence(s) encoding the one or more BCAA transporters is expressed under the control of an inducible promoter that is directly or indirectly induced by exogenous environmental conditions. In some embodiments, the gene sequence(s) encoding the one or more BCAA catabolism enzymes and the gene sequence(s) encoding the one or more BCAA transporters is expressed under the control of an inducible promoter that is directly or indirectly induced by exogenous environmental conditions. In some embodiments, the gene sequence(s) encoding the one or more BCAA transporters is expressed under the control of an inducible promoter that is directly or indirectly induced by low-oxygen or anaerobic conditions, wherein expression of the gene encoding the one or more transporters is activated under low-oxygen or anaerobic environments, such as the environment of the mammalian gut. In some embodiments, the gene sequence(s) encoding the one or more BCAA catabolism enzymes and the gene sequence(s) encoding the one or more BCAA transporters is expressed under the control of an inducible promoter that is directly or indirectly induced by low-oxygen or anaerobic conditions, wherein expression of the gene(s) encoding the one or more BCAA catabolism enzymes and expression of the gene(s) encoding the one or more BCAA transporters is activated under low-oxygen or anaerobic environments, such as the environment of the mammalian gut. In some embodiments, the gene sequence(s) encoding the one or more BCAA transporters is expressed under the control of an inducible promoter that is directly or indirectly induced by inflammatory conditions. In some embodiments, the gene sequence(s) encoding the one or more BCAA catabolism enzymes and the gene sequence(s) encoding the one or more BCAA transporters is expressed under the control of an inducible promoter that is directly or indirectly induced by inflammatory conditions. Exemplary inducible promoters described herein include oxygen level-dependent promoters (e.g., FNR-inducible promoter), promoters induced by inflammation or an inflammatory response (RNS, ROS promoters), and promoters induced by a metabolite that may or may not be naturally present (e.g., can be exogenously added) in the gut, e.g., arabinose and tetracycline. Examples of inducible promoters include, but are not limited to, an FNR responsive promoter, a P_{araC} promoter, a P_{araBAD} promoter, and a P_{TetR} promoter, each of which are described in more detail herein.

[0239] In one embodiment, the bacterial cell comprises at least one gene encoding a transporter of a branched chain amino acid from a different organism, e.g., a different species of bacteria. In one embodiment, the bacterial cell comprises at least one native gene encoding a transporter of a branched chain amino acid. In some embodiments, the at least one native gene encoding a transporter of a branched chain amino acid is not modified. In another embodiment, the bacterial cell comprises more than one copy of at least one native gene encoding a transporter of a branched chain amino acid. In yet another embodiment, the bacterial cell comprises a copy of at least one gene encoding a native transporter of a branched chain amino acid, as well as at least one copy of at least one heterologous gene encoding a transporter of a branched chain amino acid. The heterologous gene sequence may encode an additional copy or copies of the native transporter, may encode one or more copies of a non-native transporter, and/or may encode one or more copies of a homologous or different transporter from a different bacterial species. In one embodiment, the bacterial cell comprises at least one, two, three, four, five, or six copies of the at least one heterologous gene encoding a transporter of a branched chain amino acid. In one embodiment, the bacterial cell comprises multiple copies of the at least one heterologous gene encoding a transporter of a branched chain amino acid. In one embodiment, the bacterial cell comprises gene sequence(s) encoding two or more different transporters of a branched chain amino acid. In one embodiment, the gene sequence(s) encoding two or more different transporters of a branched chain amino acid is under the control of one or more inducible promoters. In one embodiment, the gene sequence(s) encoding two or more different transporters of a branched chain amino acid is under the control of one or more constitutive promoters. In one embodiment, the gene sequence(s) encoding two or more different transporters of a branched chain amino acid is under the control of at least one inducible promoter and at least one constitutive promoter. In any of these embodiments, the gene sequence(s) encoding the one or more BCAA transporter(s) may be present on one or more plasmids. In any of these embodiments, the gene sequence(s) encoding the one or more BCAA transporter(s) may be present in the bacterial chromosome.

[0240] In one embodiment, the transporter of a branched chain amino acid imports a branched chain amino acid into the bacterial cell. In one embodiment, the transporter of a branched chain amino acid imports leucine into the bacterial cell. In one embodiment, the transporter of a branched chain amino acid imports isoleucine into the bacterial cell. In one embodiment, the transporter of a branched chain amino acid imports valine into the bacterial cell. In one embodiment, the transporter of a branched chain amino acid imports one or more of leucine, isoleucine, and valine into the bacterial cell.

[0241] In some embodiments, the transporter of a branched chain amino acid is encoded by a transporter of a branched chain amino acid gene derived from a bacterial genus or species, including but not limited to, Bacillus, Campylobacter, Clostridium, Escherichia, Lactobacillus, Pseudomonas, Salmonella, Staphylococcus, Bacillus subtilis, Campylobacter jejuni, Clostridium perfringens, Escherichia coli, Lactobacillus delbrueckii, Pseudomonas aeruginosa, Salmonella typhimurium, or Staphylococcus aureus. In some embodiments, the bacterial species is Escherichia coli. In some embodiments, the bacterial species is Escherichia coli strain Nissle.

[0242] Multiple distinct transporters of branched chain amino acids are known in the art. In one embodiment, the at least one gene encoding a transporter of a branched chain amino acid is the brnQ gene. In one embodiment, the at least one gene encoding a transporter of a branched chain amino acid is the livKHMGF operon. In another embodiment, the livKHMGF operon is an Escherichia coli livKHMGF operon. In any of these embodiments, the bacterial cell may comprise more than one copy of any of one or more of these gene sequences. In any of these embodiments, the bacterial cell may over-express any one or more of these gene sequences. In any of these embodiments, the bacterial cell may further comprise gene sequence(s) encoding one or more additional BCAA transporters, e.g., BmQ transporter.

[0243] The present disclosure further provides genes encoding functional fragments of a transporter of a branched chain amino acid or functional variants of an importer of a branched chain amino acid. As used herein, the term “functional fragment thereof” or “functional variant thereof” of a transporter of a branched chain amino acid relates to an element having qualitative biological activity in common with the wild-type transporter of a branched chain amino acid from which the fragment or variant was derived. For example, a functional fragment or a functional variant of a mutated transporter of a branched chain amino acid protein is one which retains essentially the same ability to import leucine into the bacterial cell as does the importer protein from which the functional fragment or functional variant was derived. In one embodiment, the recombinant bacterial cell disclosed herein comprises at least one heterologous gene encoding a functional fragment of a transporter of branched chain amino acid. In another embodiment, the recombinant bacterial cell disclosed herein comprises a heterologous gene encoding a functional variant of a transporter of branched chain amino acid.

[0244] Assays for testing the activity of an importer of a branched chain amino acid, a functional variant of a transporter of a branched chain amino acid, or a functional fragment of a transporter of a branched chain amino acid are well known to one of ordinary skill in the art. For example, import of a branched chain amino acid may be determined using the methods as described in Haney et al., J. Bact., 174(1):108-15, 1992; Rahmanian et al., J. Bact., 116(3):1258-66, 1973; and Ribardo and Hendrixson, J. Bact., 173(22):6233-43, 2011, the entire contents of each of which are expressly incorporated by reference herein.

[0245] In one embodiment, the genes encoding the transporter of a branched chain amino acid have been codon-optimized for use in the host organism. In one embodiment, the genes encoding the importer of a branched chain amino acid have been codon-optimized for use in Escherichia coli.

[0246] The present disclosure also encompasses genes encoding a transporter of a branched chain amino acid, e.g., a transporter of leucine, comprising amino acids in its sequence that are substantially the same as an amino acid sequence described herein. Amino acid sequences that are substantially the same as the sequences described herein include sequences comprising conservative amino acid substitutions, as well as amino acid deletions and/or insertions.

[0247] In some embodiments, the at least one gene encoding a transporter of a branched chain amino acid, e.g., livKHMGF, is mutagenized; mutants exhibiting increased branched chain amino acid, e.g., leucine, transport are selected; and the mutagenized at least one gene encoding a transporter of a branched chain amino acid, e.g., livKHMGF, is isolated and inserted into the bacterial cell. In some embodiments, the at least one gene encoding a transporter of a branched chain amino acid, e.g., livKHMGF, is mutagenized; mutants exhibiting decreased branched chain amino acid, e.g., leucine, transport are selected; and the mutagenized at least one gene encoding a transporter of a branched chain amino acid, e.g., livKHMGF, is isolated and inserted into the bacterial cell. The importer modifications described herein may be present on a plasmid or chromosome.

[0248] In one embodiment, the livKHMGF operon has at least about 80% identity with the uppercase sequence of SEQ ID NO: 145. Accordingly, in one embodiment, the livKHMGF operon has at least about 90% identity with the uppercase sequence of SEQ ID NO: 145. Accordingly, in one embodiment, the livKHMGF operon has at least about 95% identity with the uppercase sequence of SEQ ID NO: 145. Accordingly, in one embodiment, the livKHMGF operon has at least about 85%, 86%, 87%, 88%, 89%, 90%, 91%, 92%, 93%, 94%, 95%, 96%, 97%, 98%, or 99% identity with the uppercase sequence of SEQ ID NO: 145. In another embodiment, the livKHMGF operon comprises the uppercase sequence of SEQ ID NO:145. In yet another embodiment the livKHMGF operon consists of the uppercase sequence of SEQ ID NO: 145.

[0249] In some embodiments, the brnQ gene has at least about 80% identity with the entire sequence of any one of SEQ ID NOs: 121-144. Accordingly, in one embodiment, the brnQ gene has at least about 90% identity with the entire sequence of any one of SEQ ID NOs: 121-144. Accordingly, in one embodiment, the brnQ gene has at least about 95% identity with the entire sequence of any one of SEQ ID NOs: 121-144. Accordingly, in one embodiment, the brnQ gene has at least about 85%, 86%, 87%, 88%, 89%, 90%, 91%, 92%, 93%, 94%, 95%, 96%, 97%, 98%, or 99% identity with the entire sequence of any one of SEQ ID NOs: 121-144. In another embodiment, the brnQ gene comprises the sequence of any one of SEQ ID NOs: 121-144. In yet another embodiment, the brnQ gene consists of any one of SEQ ID NOs: 121-144.

[0250] In some embodiments, the bacterial cell comprises a heterologous gene encoding a branched chain amino acid catabolism enzyme operably linked to a first promoter and at least one heterologous gene encoding a transporter of a branched chain amino acid. In some embodiments, the at least one heterologous gene encoding a transporter of a branched chain amino acid is operably linked to the first promoter. In other embodiments, the at least one heterologous gene encoding a transporter of a branched chain amino acid is operably linked to a second promoter. In one embodiment, the at least one gene encoding a transporter of a branched chain amino acid is directly operably linked to the second promoter. In another embodiment, the at least one gene encoding a transporter of a branched chain amino acid is indirectly operably linked to the second promoter.

[0251] In some embodiments, expression of at least one gene encoding a transporter of a branched chain amino acid, e.g., livKHMGF and/or brnQ, is controlled by a different promoter than the promoter that controls expression of the gene encoding the branched chain amino acid catabolism enzyme. In some embodiments, expression of the at least one gene encoding a transporter of a branched chain amino acid, e.g., livKHMGF and/or brnQ, is controlled by the same promoter that controls expression of the branched chain amino acid catabolism enzyme. In some embodiments, at least one gene encoding a transporter of a branched chain amino acid, e.g., livKHMGF and/or brnQ, and the branched chain amino acid catabolism enzyme are divergently transcribed from a promoter region. In some embodiments, expression of each of genes encoding the at least one gene encoding a transporter of a branched chain amino acid, e.g., livKHMGF and/or brnQ, and the gene encoding the branched chain amino acid catabolism enzyme is controlled by different promoters.

[0252] In one embodiment, the at least one gene encoding a transporter of a branched chain amino acid is not operably linked to its native promoter. In some embodiments, the at least one gene encoding the transporter of a branched chain amino acid, e.g., livKHMGF, is controlled by its native promoter. In some embodiments, the at least one gene encoding a transporter of a branched chain amino acid, e.g., livKHMGF and/or brnQ, is controlled by an inducible promoter. In some embodiments, the at least one gene encoding a transporter of a branched chain amino acid, e.g., livKHMGF and/or brnQ, is controlled by a promoter that is stronger than its native promoter. In some embodiments, the at least one gene encoding a transporter of a branched chain amino acid, e.g., livKHMGF, is controlled by a constitutive promoter.

[0253] In another embodiment, the promoter is an inducible promoter. Inducible promoters are described in more detail infra.

[0254] In one embodiment, the at least one gene encoding a transporter of a branched chain amino acid is located on a plasmid in the bacterial cell. In another embodiment, the at least one gene encoding a transporter of a branched chain amino acid is in the chromosome of the bacterial cell. In yet another embodiment, a native copy of the at least one gene encoding a transporter of a branched chain amino acid is located in the chromosome of the bacterial cell, and a copy of at least one gene encoding a transporter of a branched chain amino acid from a different species of bacteria is located on a plasmid in the bacterial cell. In yet another embodiment, a native copy of the at least one gene encoding a transporter of a branched chain amino acid is located on a plasmid in the bacterial cell, and a copy of at least one gene encoding a transporter of a branched chain amino acid from a different species of bacteria is located on a plasmid in the bacterial cell. In yet another embodiment, a native copy of the at least one gene encoding a transporter of a branched chain amino acid is located in the chromosome of the bacterial cell, and a copy of the at least one gene encoding an importer of a branched chain amino acid from a different species of bacteria is located in the chromosome of the bacterial cell.

[0255] In some embodiments, the at least one native gene encoding a transporter, e.g., livKHMGF and/or brnQ, in the bacterial cell is not modified, and one or more additional copies of the native transporter, e.g., livKHMGF and/or brnQ, are inserted into the genome. In some embodiments, the at least one native gene encoding a transporter, e.g., livKHMGF and/or brnQ, in the bacterial cell is not modified, and one or more additional copies of the native transporter, e.g., livKHMGF and/or brnQ, are present on a plasmid, e.g., a high copy or low copy plasmid. In one embodiment, the one or more additional copies of the native a transporter, e.g., livKHMGF and/or brnQ, that is inserted into the genome are under the control of the same inducible promoter that controls expression of the gene encoding the branched chain amino acid catabolism enzyme, e.g., the FNR responsive promoter, or a different inducible promoter than the one that controls expression of the branched chain amino acid catabolism enzyme, or a constitutive promoter. In alternate embodiments, the at least one native gene encoding the transporter, e.g., livKHMGF and/or brnQ, is not modified, and one or more additional copies of the transporter, e.g., livKHMGF, from a different bacterial species is inserted into the genome of the bacterial cell. In one embodiment, the one or more additional copies of the transporter inserted into the genome of the bacterial cell are under the control of the same inducible promoter that controls expression of the gene encoding the branched chain amino acid catabolism enzyme, e.g., the FNR responsive promoter, or a different inducible promoter than the one that controls expression of the gene encoding the branched chain amino acid catabolism enzyme, or a constitutive promoter.

[0256] In some embodiments, at least one native gene encoding the transporter, e.g., livKHMGF and/or brnQ, in the genetically modified bacteria is not modified, and one or more additional copies of at least one native gene encoding the transporter, e.g., livKHMGF and or brnQ, are present in the bacterial cell on a plasmid. In one embodiment, the at least one native gene encoding the transporter e.g., livKHMGF and/or brnQ, present in the bacterial cell on a plasmid is under the control of the same inducible promoter that controls expression of the gene encoding the branched chain amino acid catabolism enzyme, e.g., the FNR responsive promoter, or a different inducible promoter than the one that controls expression of the gene encoding the branched chain amino acid catabolism enzyme, or a constitutive promoter. In alternate embodiments, the at least one native gene encoding the transporter, e.g., livKHMGF and/or brnQ, is not modified, and a copy of at least one gene encoding the transporter, e.g., livKHMGF and/or brnQ, from a different bacterial species is present in the bacteria on a plasmid. In one embodiment, the copy of at least one gene encoding the transporter, e.g., livKHMGF and/or brnQ, from a different bacterial species is under the control of the same inducible promoter that controls expression of the gene encoding the branched chain amino acid catabolism enzyme, e.g., the FNR responsive promoter, or a different inducible promoter than the one that controls expression of the gene encoding the branched chain amino acid catabolism enzyme, or a constitutive promoter.

[0257] In some embodiments, the bacterium is E. coli Nissle, and the at least one native gene encoding the transporter, e.g., livKHMGF and/or brnQ, in E. coli Nissle is not modified; one or more additional copies at least one native gene encoding the transporter, e.g., livKHMGF and/or brnQ, from E. coli Nissle is inserted into the E. coli Nissle genome under the control of the same inducible promoter that controls expression of the gene encoding the branched chain amino acid catabolism enzyme, e.g., the FNR responsive promoter, or a different inducible promoter than the one that controls expression of the gene encoding the branched chain amino acid catabolism enzyme, or a constitutive promoter. In an alternate embodiment, the at least one native gene encoding the a transporter, e.g., livKHMGF and/or brnQ in E. coli Nissle is not modified, and a copy of at least one gene encoding the transporter, e.g., livKHMGF and/or brnQ, from a different bacterial species is inserted into the E. coli Nissle genome under the control of the same inducible promoter that controls expression of the gene encoding the branched chain amino acid catabolism enzyme, e.g., the FNR responsive promoter, or a different inducible promoter than the one that controls expression of the gene encoding the branched chain amino acid catabolism enzyme, or a constitutive promoter.

[0258] In some embodiments, the bacterial cell is E. coli Nissle, and the at least one native gene encoding the transporter, e.g., livKHMGF and/or brnQ, in E. coli Nissle is not modified; one or more additional copies the at least one native gene encoding the transporter, e.g., livKHMGF and/or brnQ, E. coli Nissle is present in the bacterium on a plasmid and under the control of the same inducible promoter that controls expression of the gene encoding the branched chain amino acid catabolism enzyme, e.g., the FNR responsive promoter, or a different inducible promoter than the one that controls expression of the gene encoding the branched chain amino acid catabolism enzyme, or a constitutive promoter. In an alternate embodiment, the at least one native gene encoding the transporter, e.g., livKHMGF, in E. coli Nissle is not modified, and a copy of at least one native gene encoding the transporter, e.g., livKHMGF and/or brnQ, from a different bacterial species of are present in the bacterium on a plasmid and under the control of the same inducible promoter that controls expression of the gene encoding the branched chain amino acid catabolism enzyme, e.g., the FNR responsive promoter, or a different inducible promoter than the one that controls expression of the gene encoding the branched chain amino acid catabolism enzyme, or a constitutive promoter.

[0259] In one embodiment, when the transporter of a branched chain amino acid is expressed in the recombinant bacterial cells disclosed herein, the bacterial cells import 10% more branched chain amino acids, e.g., leucine, into the bacterial cell when the transporter is expressed as compared to unmodified bacteria of the same bacterial subtype under the same conditions. In another embodiment, when the transporter of a branched chain amino acid is expressed in the recombinant bacterial cells disclosed herein, the bacterial cells import 20%, 30%, 40%, 50%, 60%, 70%, 80%, 90% or 100% more branched chain amino acids, e.g., leucine, into the bacterial cell when the transporter is expressed as compared with unmodified bacteria of the same bacterial subtype under the same conditions. In yet another embodiment, when the transporter of a branched chain amino acid is expressed in the recombinant bacterial cells disclosed herein, the bacterial cells import two-fold more branched chain amino acids, e.g., leucine, into the cell when the transporter is expressed than unmodified bacteria of the same bacterial subtype under the same conditions. In yet another embodiment, when the transporter of a branched chain amino acid is expressed in the recombinant bacterial cells disclosed herein, the bacterial cells import three-fold, four-fold, five-fold, six-fold, seven-fold, eight-fold, nine-fold, or ten-fold more branched chain amino acids, e.g., leucine, into the cell when a transporter is expressed as compared with unmodified bacteria of the same bacterial subtype under the same conditions.

[0260] Exporter of a Branched Chain Amino Acid

[0261] The bacterial cells disclosed herein may comprise a genetic modification that inhibits or decreases the export of a branched chain amino acid and/or its corresponding alpha keto acid or other metabolite from the bacterial cell. Knocking-out or reducing export of one or more branched chain amino acids from a bacterial cell allows the bacterial cell to more efficiently retain and catabolize exogenous branched chain amino acids and/or their alpha-keto acid counterparts or other metabolite counterparts in order to treat the diseases and disorders described herein. Any of the bacterial cells disclosed herein comprising gene sequence encoding one or more BCAA catabolism enzymes and/or one or more BCAA transporters may further a genetic modification that inhibits or decreases the export of a branched chain amino acid and/or its corresponding alpha keto acid or other metabolite from the bacterial cell.

[0262] The export of branched chain amino acids from bacterial cells is mediated by proteins well known to those of skill in the art. For example, one branched chain amino acid exporter, the leucine exporter LeuE has been characterized in Escherichia coli (Kutukova et al., FEBS Letters 579:4629-34 (2005); incorporated herein by reference). LeuE is encoded by the leuE gene in Escherichia coli (also known as yeaS). Additionally, a two-gene encoded exporter of the branched chain amino acids isoleucine, valine and leucine, denominated BmFE was identified in the bacteria Corynebacterium glutamicum (Kennerknecht et al., J. Bacteriol. 184:3947-56 (2002); incorporated herein by reference). The BmFE system is encoded by the Corynebacterium glutamicum genes brnF and brnE, and homologues of said genes have been identified in several organisms, including Agrobacterium tumefaciens, Achaeoglobus fulgidus, Bacillus subtilis, Deinococcus radiodurans, Escherichia coli, Haemophilus influenzae, Helicobacter pylori, Lactococcus lactis, Streptococcus pneumoniae, and Vibrio cholerae (see Kennerknecht et al., 2002).

[0263] The bacterial cells disclosed herein comprise a genetic modification that reduces export of a branched chain amino acid from the bacterial cell. Multiple distinct exporters of branched chain amino acids, e.g., leucine, are known in the art. In one embodiment, the recombinant bacterial cell disclosed herein comprises a genetic modification that reduces export of a branched chain amino acid from the bacterial cell, wherein the endogenous gene encoding an exporter of a branched chain amino acid is a leuE gene.

[0264] In one embodiment, the recombinant bacterial cell disclosed herein comprises a genetic modification that reduces export of a branched chain amino acid from the bacterial cell and a heterologous gene encoding a branched chain amino acid catabolism enzyme. When the recombinant bacterial cells disclosed herein comprise a genetic modification that reduces export of a branched chain amino acid, the bacterial cells retain more branched chain amino acids, e.g., leucine, in the bacterial cell than unmodified bacteria of the same bacterial subtype under the same conditions. Thus, the recombinant bacteria comprising a genetic modification that reduces export of a branched chain amino acid may be used to retain more branched chain amino acids in the bacterial cell so that any branched chain amino acid catabolism enzyme expressed in the organism, e.g., co-expressed α-ketoisovalerate decarboxylase or co-expressed branched chain keto dehydrogenase, can catabolize the branched chain amino acids, e.g., leucine, to treat diseases associated with the catabolism of branched chain amino acids, including Maple Syrup Urine Disease (MSUD). In one embodiment, the recombinant bacteria further comprise a heterologous gene encoding an importer of a branched chain amino acid, e.g., a livKHMGF and/or brnQ gene.

[0265] In one embodiment, the genetic modification reduces export of a branched chain amino acid, e.g., leucine, from the bacterial cell. In one embodiment, the bacterial cell is from a bacterial genus or species that includes but is not limited to, Bacillus, Bacteroides, Bifdobacterium, Brevibacteria, Clostridium, Enterococcus, Escherichia, Lactobacillus, Lactococcus, and Staphylococcus, e.g., Bacillus coagulans, Bacillus subtilis, Bacteroides fragilis, Bacteroides subtilis, Bacteroides thetaiotaomicron, Bifidobacterium bifdum, Bifidobacterium infantis, Bifdobacterium lactis, Bifidobacterium longum, Clostridium butyricum, Enterococcus faecium, Escherichia coli, Lactobacillus acidophilus, Lactobacillus bulgaricus, Lactobacillus casei, Lactobacillus johnsonii, Lactobacillus paracasei, Lactobacillus plantarum, Lactobacillus reuteri, Lactobacillus rhamnosus, Lactococcus lactis. In another embodiment, the bacterial cell is an Escherichia coli bacterial cell. In another embodiment, the bacterial cell is an Escherichia coli strain Nissle bacterial cell.

[0266] In one embodiment, the genetic modification is a mutation in an endogenous gene encoding an exporter of a branched chain amino acid. In one embodiment, the genetic mutation is a deletion of the endogenous gene encoding an exporter, e.g., leuE, of a branched chain amino acid. In another embodiment, the genetic mutation results in an exporter having reduced activity as compared to a wild-type exporter protein. In one embodiment, the activity of the exporter is reduced at least 50%, at least 75%, or at least 100%. In another embodiment, the activity of the exporter is reduced at least two-fold, three-fold, four-fold, or five-fold. In another embodiment, the genetic mutation results in an exporter, e.g., LeuE, having no activity, i.e., results in an exporter, e.g., LeuE, which cannot export a branched chain amino acid, e.g., lysine, from the bacterial cell.

[0267] It is routine for one of ordinary skill in the art to make mutations in a gene of interest. Mutations include substitutions, insertions, deletions, and/or truncations of one or more specific amino acid residues or of one or more specific nucleotides or codons in the polypeptide or polynucleotide of the exporter of a branched chain amino acid. Mutagenesis and directed evolution methods are well known in the art for creating variants. See, e.g., U.S. Pat. Nos. 7,783,428; 6,586,182; 6,117,679; and Ling, et al., 1999, “Approaches to DNA mutagenesis: an overview,” Anal. Biochem., 254(2):157-78; Smith, 1985, “In vitro mutagenesis,” Ann. Rev. Genet., 19:423-462; Carter, 1986, “Site-directed mutagenesis,” Biochem. J, 237:1-7; and Minshull, et al., 1999, “Protein evolution by molecular breeding,” Current Opinion in Chemical Biology, 3:284-290. For example, the lambda red system can be used to knock-out genes in E. coli (see, for example, Datta et al., Gene, 379:109-115 (2006)).

[0268] The term “inactivated” as applied to a gene refers to any genetic modification that decreases or eliminates the expression of the gene and/or the functional activity of the corresponding gene product (mRNA and/or protein). The term “inactivated” encompasses complete or partial inactivation, suppression, deletion, interruption, blockage, promoter alterations, antisense RNA, dsRNA, or down-regulation of a gene. This can be accomplished, for example, by gene “knockout,” inactivation, mutation (e.g., insertion, deletion, point, or frameshift mutations that disrupt the expression or activity of the gene product), or by use of inhibitory RNAs (e.g., sense, antisense, or RNAi technology). A deletion may encompass all or part of a gene's coding sequence. The term “knockout” refers to the deletion of most (at least about 95%, at least about 96%, at least about 97%, at least about 98%, or at least about 99%) or all (100%) of the coding sequence of a gene. In some embodiments, any number of nucleotides can be deleted, from a single base to an entire piece of a chromosome.

[0269] Assays for testing the activity of an exporter of a branched chain amino acid, e.g., leucine, are well known to one of ordinary skill in the art. For example, export of a branched chain amino acid, such as leucine, may be determined using the methods described by Haney et al., J. Bact., 174(1):108-15, 1992; Rahmanian et al., J. Bact., 116(3):1258-66, 1973; and Ribardo and Hendrixson, J. Bact., 173(22):6233-43, 2011, the entire contents of which are expressly incorporated herein by reference.

[0270] In another embodiment, the genetic modification is a mutation in a promoter of an endogenous gene encoding an exporter of a branched chain amino acid. In one embodiment, the genetic mutation results in decreased expression of the leuE gene. In one embodiment, leuE gene expression is reduced by about 50%, 75%, or 100%. In another embodiment, leuE gene expression is reduced about two-fold, three-fold, four-fold, or five-fold. In another embodiment, the genetic mutation completely inhibits expression of the leuE gene.

[0271] Assays for testing the level of expression of a gene, such as an exporter of a branched chain amino acid, e.g., leuE, are well known to one of ordinary skill in the art. For example, reverse-transcriptase polymerase chain reaction may be used to detect the level of mRNA expression of a gene. Alternatively, Western blots using antibodies directed against a protein may be used to determine the level of expression of the protein.

[0272] In another embodiment, the genetic modification is an overexpression of a repressor of an exporter of a branched chain amino acid. In one embodiment, the overexpression of the repressor of the exporter is caused by a mutation which renders the promoter of the repressor constitutively active. In another embodiment, the overexpression of the repressor of the exporter is caused by the insertion of an inducible promoter in front of the repressor so that the expression of the repressor can be induced. Inducible promoters are described in more detail herein.

[0273] Reduction of Endogenous Bacterial Branched Chain Amino Acid Production

[0274] The bacterial cells disclosed herein may comprise a genetic modification that inhibits or decreases the biosynthesis of a branched chain amino acid and/or its corresponding alpha keto acid or other metabolite in the bacterial cell. Knocking-out or reducing production of endogenous branched chain amino acids in a bacterial cell allows the bacterial cell to more efficiently take up and catabolize exogenous branched chain amino acids and/or their alpha-keto acid counterparts or other metabolite counterparts in order to treat the diseases and disorders described herein. Knock-out or knock down of a gene encoding an enzyme required for branched chain amino acid biosynthesis creates an auxotroph, which requires the cell to import the branched chain amino acid or a metabolite to survive. Any of the bacterial cells disclosed herein comprising gene sequence encoding one or more BCAA catabolism enzymes and/or one or more BCAA transporters may further a genetic modification that inhibits or decreases the biosynthesis of a branched chain amino acid and/or its corresponding alpha keto acid or other metabolite in the bacterial cell.

[0275] As used herein, the term “branched chain amino acid biosynthesis” enzyme refers to an enzyme involved in the biosynthesis of a branched chain amino acid and/or its corresponding alpha-keto acid or other metabolite. Multiple distinct genes involved in biosynthetic pathways of branched chain amino acids, e.g., isoleucine, leucine, and valine, are known in the art. For example, the ilvC gene encodes a keto-acid reductoisomerase enzyme that catalyzes the conversion of acetohydroxy acids into dihydroxy valerates, which leads to the synthesis of the essential branched side chain amino acids valine and isoleucine (EC 1.1.1.86) and has been characterized in Escherichia coli (Wek and Hatfield, J. Biol. Chem. 261:2441-50 (1986), the entire contents of which are expressly incorporated herein by reference). Additionally, homologues of ilvC have been identified in several organisms, including Candida albicans, Oryza sativa, Saccharomyces cerevisiae, Pseudomonas aeruginosa, Corynebacterium glutamicum, and Spinacia oleracea.

[0276] In one embodiment, the genetic modification is a mutation in an endogenous gene encoding a protein that is involved in the biosynthesis of a branched chain amino acid or an alpha keto acid, e.g., ilvC. ilvC is an acetohydroxy acid isomeroreductase that is required for branched chain amino acid synthesis. In one embodiment, the genetic mutation is a deletion of an endogenous gene encoding a protein that is involved in the biosynthesis of a branched chain amino acid or an alpha-keto acid, or other BCAA metabolite, e.g., ilvC. In another embodiment, the genetic mutation results in an enzyme having reduced activity as compared to a wild-type enzyme. In one embodiment, the activity of the enzyme is reduced at least 50%, at least 75%, or at least 100%. In another embodiment, the activity of the enzyme is reduced at least two-fold, three-fold, four-fold, or five-fold. In another embodiment, the genetic mutation results in an enzyme, e.g., IlvC, having no activity, i.e., results in an enzyme, e.g., IlvC, which cannot catalyze the conversion of acetohydroxy acids into dihydroxy valerates, thereby inhibiting the endogenous synthesis of the branched chain amino acids valine and isoleucine in the recombinant bacterial cell.

[0277] It is routine for one of ordinary skill in the art to make mutations in a gene of interest. Mutations include substitutions, insertions, deletions, and/or truncations of one or more specific amino acid residues or of one or more specific nucleotides or codons in the polypeptide or polynucleotide of the exporter of a branched chain amino acid. Mutagenesis and directed evolution methods are well known in the art for creating variants. See, e.g., U.S. Pat. Nos. 7,783,428; 6,586,182; 6,117,679; and Ling, et al., 1999, “Approaches to DNA mutagenesis: an overview,” Anal. Biochem., 254(2):157-78; Smith, 1985, “In vitro mutagenesis,” Ann. Rev. Genet., 19:423-462; Carter, 1986, “Site-directed mutagenesis,” Biochem. J., 237:1-7; and Minshull, et al., 1999, “Protein evolution by molecular breeding,” Current Opinion in Chemical Biology, 3:284-290. For example, the lambda red system can be used to knock-out genes in E. coli (see, for example, Datta et al., Gene, 379:109-115 (2006)).

[0278] The term “inactivated,” as applied to a gene, refers to any genetic modification that decreases or eliminates the expression of the gene and/or the functional activity of the corresponding gene product (mRNA and/or protein). The term “inactivated” encompasses complete or partial inactivation, suppression, deletion, interruption, blockage, promoter alterations, antisense RNA, dsRNA, or down-regulation of a gene. This can be accomplished, for example, by gene “knockout,” inactivation, mutation (e.g., insertion, deletion, point, or frameshift mutations that disrupt the expression or activity of the gene product), or by use of inhibitory RNAs (e.g., sense, antisense, or RNAi technology). A deletion may encompass all or part of a gene's coding sequence. The term “knockout” refers to the deletion of most (at least about 95%, at least about 96%, at least about 97%, at least about 98%, or at least about 99%) or all (100%) of the coding sequence of a gene. In some embodiments, any number of nucleotides can be deleted, from a single base to an entire piece of a chromosome.

[0279] Assays for testing the activity of enzymes involved in the biosynthesis of branched chain amino acids and/or alpha-keto acids, and/or other BCAA metabolite e.g., ilvC, are well known to one of ordinary skill in the art. For example, the activity of a ketol-acid reductoisomerase enzyme may be determined using the methods described by Durner et al., Plant Physiol., 103:903-910, 1993, the entire contents of which are expressly incorporated herein by reference.

[0280] In another embodiment, the genetic modification is a mutation in a promoter of an endogenous gene encoding the branched chain amino acid biosynthesis enzyme. In one embodiment, the genetic mutation results in decreased expression of the branched chain amino acid biosynthesis enzyme gene. In one embodiment, gene expression is reduced by about 50%, 75%, or 100%. In another embodiment, gene expression is reduced about two-fold, three-fold, four-fold, or five-fold. In another embodiment, the genetic mutation completely inhibits expression of the gene.

[0281] Assays for testing the level of expression of a gene, such as ilvC, are well known to one of ordinary skill in the art. For example, reverse-transcriptase polymerase chain reaction may be used to detect the level of mRNA expression of a gene. Alternatively, Western blots using antibodies directed against a protein may be used to determine the level of expression of the protein.

[0282] In another embodiment, the genetic modification is an overexpression of a repressor of a branched chain amino acid biosynthesis gene. In one embodiment, the overexpression of the repressor of the gene is caused by a mutation which renders the promoter of the repressor constitutively active. In another embodiment, the overexpression of the repressor of the branched chain amino acid biosynthesis gene is caused by the insertion of an inducible promoter in front of the repressor so that the expression of the repressor can be induced. Inducible promoters are described in more detail herein.

[0283] Inducible Promoters

[0284] In some embodiments, the bacterial cell comprises a stably maintained plasmid or chromosome carrying the one or more optimized genes, e.g., kivD, leuDH, adh2, and brnQ, such that the optimized enzymes can be expressed in the host cell, and the host cell is capable of survival and/or growth in vitro, e.g., in medium, and/or in vivo, e.g., in the gut.

[0285] In some embodiments, the gene encoding the branched chain amino acid catabolism enzyme is present on a plasmid and operably linked to a directly or indirectly inducible promoter. In some embodiments, the gene encoding the branched chain amino acid catabolism enzyme is present on a plasmid and operably linked to a promoter that is induced under low-oxygen or anaerobic conditions. In some embodiments, the gene encoding the branched chain amino acid catabolism enzyme is present on a chromosome and operably linked to a directly or indirectly inducible promoter. In some embodiments, the gene encoding the branched chain amino acid catabolism enzyme is present in the chromosome and operably linked to a promoter that is induced under low-oxygen or anaerobic conditions. In some embodiments, the gene encoding the branched chain amino acid catabolism enzyme is present on a plasmid and operably linked to a promoter that is induced by exposure to tetracycline or arabinose.

[0286] In some embodiments, the bacterial cell comprises a stably maintained plasmid or chromosome carrying the at least one gene encoding a transporter of a branched chain amino acid, e.g., livKHMGF and/or brnQ, such that the transporter, e.g., LivKHMGF and/or BrnQ, can be expressed in the host cell, and the host cell is capable of survival and/or growth in vitro, e.g., in medium, and/or in vivo, e.g., in the gut. In some embodiments, bacterial cell comprises two or more distinct copies of the at least one gene encoding a transporter of a branched chain amino acid, e.g., livKHMGF and/or brnQ. In some embodiments, the genetically engineered bacteria comprise multiple copies of the same at least one gene encoding a transporter of a branched chain amino acid, e.g., livKHMGF and/or brnQ. In some embodiments, the at least one gene encoding a transporter of a branched chain amino acid, e.g., livKHMGF and/or brnQ, is present on a plasmid and operably linked to a directly or indirectly inducible promoter. In some embodiments, the at least one gene encoding a transporter of a branched chain amino acid, e.g., livKHMGF and/or brnQ, is present on a plasmid and operably linked to a promoter that is induced under low-oxygen or anaerobic conditions. In some embodiments, the at least one gene encoding a transporter of a branched chain amino acid, e.g., livKHMGF and/or brnQ, is present on a chromosome and operably linked to a directly or indirectly inducible promoter. In some embodiments, the at least one gene encoding a transporter of a branched chain amino acid, e.g., livKHMGF and/or brnQ, is present in the chromosome and operably linked to a promoter that is induced under low-oxygen or anaerobic conditions. In some embodiments, the at least one gene encoding a transporter of a branched chain amino acid, e.g., livKHMGF and/or brnQ, is present on a plasmid and operably linked to a promoter that is induced by exposure to tetracycline.

[0287] In some embodiments, the promoter that is operably linked to the gene encoding the branched chain amino acid catabolism enzyme and the promoter that is operably linked to the gene encoding the transporter of a branched chain amino acid, e.g., livKHMGF and/or brnQ, is directly induced by exogenous environmental conditions. In some embodiments, the promoter that is operably linked to the gene encoding the branched chain amino acid catabolism enzyme and the promoter that is operably linked to the gene encoding the transporter of a branched chain amino acid, e.g., livKHMGF and/or brnQ, is indirectly induced by exogenous environmental conditions. In some embodiments, the promoter is directly or indirectly induced by exogenous environmental conditions specific to the gut of a mammal. In some embodiments, the promoter is directly or indirectly induced by exogenous environmental conditions specific to the small intestine of a mammal. In some embodiments, the promoter is directly or indirectly induced by low-oxygen or anaerobic conditions such as the environment of the mammalian gut. In some embodiments, the promoter is directly or indirectly induced by molecules or metabolites that are specific to the gut of a mammal, e.g., propionate. In some embodiments, the promoter is directly or indirectly induced by a molecule that is co-administered with the bacterial cell.

[0288] In certain embodiments, the bacterial cell comprises optimized genes, e.g., kivD, leuDH, adh2, and brnQ, which are expressed under the control of the fumarate and nitrate reductase regulator (FNR) promoter. In certain embodiments, the bacterial cell comprises at least one gene encoding a transporter of a branched chain amino acid, e.g., livKHMGF, is expressed under the control of the fumarate and nitrate reductase regulator (FNR) promoter. In E. coli, FNR is a major transcriptional activator that controls the switch from aerobic to anaerobic metabolism (Unden et al., 1997). In the anaerobic state, FNR dimerizes into an active DNA binding protein that activates hundreds of genes responsible for adapting to anaerobic growth. In the aerobic state, FNR is prevented from dimerizing by oxygen and is inactive.

[0289] FNR responsive promoters include, but are not limited to, the FNR responsive promoters listed in the chart, below. Underlined sequences are predicted ribosome binding sites, and bolded sequences are restriction sites used for cloning. FNR responsive promoters are set forth as SEQ ID NO: 146-162.

[0290] In some embodiments, multiple distinct FNR nucleic acid sequences are inserted in the genetically engineered bacteria. In alternate embodiments, the genetically engineered bacteria comprise a gene encoding a branched chain amino acid catabolism enzyme, or other enzyme disclosed herein, is expressed under the control of an alternate oxygen level-dependent promoter, e.g., DNR (Trunk et al., 2010) or ANR (Ray et al., 1997). In alternate embodiments, the genetically engineered bacteria comprise at least one gene encoding a transporter of a branched chain amino acid, e.g., livKHMGF and/or brnQ, is expressed under the control of an alternate oxygen level-dependent promoter, e.g., DNR (Trunk et al., 2010) or ANR (Ray et al., 1997). In these embodiments, catabolism of the branched chain amino acid, e.g., leucine, is particularly activated in a low-oxygen or anaerobic environment, such as in the gut. In some embodiments, gene expression is further optimized by methods known in the art, e.g., by optimizing ribosomal binding sites and/or increasing mRNA stability. In one embodiment, the mammalian gut is a human mammalian gut.

[0291] In some embodiments, the bacterial cell comprises an oxygen-level dependent transcriptional regulator, e.g., FNR, ANR, or DNR, and corresponding promoter from a different bacterial species. The heterologous oxygen-level dependent transcriptional regulator and promoter increase the transcription of genes operably linked to said promoter, e.g., the gene encoding the branched chain amino acid catabolism enzyme, and/or the at least one gene encoding a transporter of a branched chain amino acid, e.g., livKHMGF and/or brnQ, and/or the at least one gene encoding a binding protein of a branched chain amino acid in a low-oxygen or anaerobic environment, as compared to the native gene(s) and promoter in the bacteria under the same conditions. In certain embodiments, the non-native oxygen-level dependent transcriptional regulator is an FNR protein from N. gonorrhoeae (see, e.g., Isabella et al., 2011). In some embodiments, the corresponding wild-type transcriptional regulator is left intact and retains wild-type activity. In alternate embodiments, the corresponding wild-type transcriptional regulator is deleted or mutated to reduce or eliminate wild-type activity.

[0292] In some embodiments, the genetically engineered bacteria comprise a wild-type oxygen-level dependent transcriptional regulator, e.g., FNR, ANR, or DNR, and corresponding promoter that is mutated relative to the wild-type promoter from bacteria of the same subtype. The mutated promoter enhances binding to the wild-type transcriptional regulator and increases the transcription of genes operably linked to said promoter, e.g., the gene encoding the branched chain amino acid catabolism enzyme, and/or the at least one gene encoding a transporter of a branched chain amino acid, e.g., livKHMGF and/or brnQ, and/or the at least one gene encoding a binding protein of a branched chain amino acid in a low-oxygen or anaerobic environment, as compared to the wild-type promoter under the same conditions. In some embodiments, the genetically engineered bacteria comprise a wild-type oxygen-level dependent promoter, e.g., FNR, ANR, or DNR promoter, and corresponding transcriptional regulator that is mutated relative to the wild-type transcriptional regulator from bacteria of the same subtype. The mutated transcriptional regulator enhances binding to the wild-type promoter and increases the transcription of genes operably linked to said promoter, e.g., the gene encoding the branched chain amino acid catabolism enzyme, and/or the at least one gene encoding a transporter of a branched chain amino acid, e.g., livKHMGF and/or brnQ, and/or the at least one gene encoding a binding protein of a branched chain amino acid in a low-oxygen or anaerobic environment, as compared to the wild-type transcriptional regulator under the same conditions. In certain embodiments, the mutant oxygen-level dependent transcriptional regulator is an FNR protein comprising amino acid substitutions that enhance dimerization and FNR activity (see, e.g., Moore et al., 2006).

[0293] In some embodiments, the bacterial cells disclosed herein comprise multiple copies of the endogenous gene encoding the oxygen level-sensing transcriptional regulator, e.g., the FNR gene. In some embodiments, the gene encoding the oxygen level-sensing transcriptional regulator is present on a plasmid. In some embodiments, the gene encoding the oxygen level-sensing transcriptional regulator and the gene encoding the branched chain amino acid catabolism enzyme are present on different plasmids. In some embodiments, the gene encoding the oxygen level-sensing transcriptional regulator and the gene encoding the branched chain amino acid catabolism enzyme and/or the at least one gene encoding a transporter of a branched chain amino acid and/or the at least one gene encoding a binding protein of a branched chain amino acid are present on different plasmids. In some embodiments, the gene encoding the oxygen level-sensing transcriptional regulator and the gene encoding the branched chain amino acid catabolism enzyme and/or the at least one gene encoding a transporter of a branched chain amino acid and/or the at least one gene encoding a binding protein of a branched chain amino acid are present on the same plasmid.

[0294] In some embodiments, the gene encoding the oxygen level-sensing transcriptional regulator is present on a chromosome. In some embodiments, the gene encoding the oxygen level-sensing transcriptional regulator and the gene encoding the gene encoding the branched chain amino acid catabolism enzyme and/or the at least one gene encoding a transporter of a branched chain amino acid and/or the at least one gene encoding a binding protein of a branched chain amino acid are present on different chromosomes. In some embodiments, the gene encoding the oxygen level-sensing transcriptional regulator and the gene encoding the branched chain amino acid catabolism enzyme and/or the at least one gene encoding a transporter of a branched chain amino acid and/or the at least one gene encoding a binding protein of a branched chain amino acid are present on the same chromosome. In some instances, it may be advantageous to express the oxygen level-sensing transcriptional regulator under the control of an inducible promoter in order to enhance expression stability. In some embodiments, expression of the transcriptional regulator is controlled by a different promoter than the promoter that controls expression of the gene encoding the branched chain amino acid catabolism enzyme and/or BCAA transporter and/or BCAA binding protein. In some embodiments, expression of the transcriptional regulator is controlled by the same promoter that controls expression of the branched chain amino acid catabolism enzyme and/or BCAA transporter and/or BCAA binding protein. In some embodiments, the transcriptional regulator and the branched chain amino acid catabolism enzyme are divergently transcribed from a promoter region.

[0295] RNS-Dependent Regulation

[0296] In some embodiments, the genetically engineered bacteria comprise a gene encoding a branched chain amino acid catabolism enzyme that is expressed under the control of an inducible promoter. In some embodiments, the genetically engineered bacterium that expresses a branched chain amino acid catabolism enzyme and/or BCAA transporter and/or BCAA binding protein is under the control of a promoter that is activated by inflammatory conditions. In one embodiment, the gene for producing the branched chain amino acid catabolism enzyme and/or BCAA transporter and/or BCAA binding protein is expressed under the control of an inflammatory-dependent promoter that is activated in inflammatory environments, e.g., a reactive nitrogen species or RNS promoter.

[0297] As used herein, “reactive nitrogen species” and “RNS” are used interchangeably to refer to highly active molecules, ions, and/or radicals derived from molecular nitrogen. RNS can cause deleterious cellular effects such as nitrosative stress. RNS includes, but is not limited to, nitric oxide (NO.), peroxynitrite or peroxynitrite anion (ONOO—), nitrogen dioxide (.NO2), dinitrogen trioxide (N2O3), peroxynitrous acid (ONOOH), and nitroperoxycarbonate (ONOOCO2-) (unpaired electrons denoted by ⋅). Bacteria have evolved transcription factors that are capable of sensing RNS levels. Different RNS signaling pathways are triggered by different RNS levels and occur with different kinetics.

[0298] As used herein, “RNS-inducible regulatory region” refers to a nucleic acid sequence to which one or more RNS-sensing transcription factors is capable of binding, wherein the binding and/or activation of the corresponding transcription factor activates downstream gene expression; in the presence of RNS, the transcription factor binds to and/or activates the regulatory region. In some embodiments, the RNS-inducible regulatory region comprises a promoter sequence. In some embodiments, the transcription factor senses RNS and subsequently binds to the RNS-inducible regulatory region, thereby activating downstream gene expression. In alternate embodiments, the transcription factor is bound to the RNS-inducible regulatory region in the absence of RNS; in the presence of RNS, the transcription factor undergoes a conformational change, thereby activating downstream gene expression. The RNS-inducible regulatory region may be operatively linked to a gene or genes, e.g., a branched chain amino acid catabolism enzymegene sequence(s), e.g., any of the amino acid catabolism enzymes described herein. For example, in the presence of RNS, a transcription factor senses RNS and activates a corresponding RNS-inducible regulatory region, thereby driving expression of an operatively linked gene sequence. Thus, RNS induces expression of the gene or gene sequences.

[0299] As used herein, “RNS-derepressible regulatory region” refers to a nucleic acid sequence to which one or more RNS-sensing transcription factors is capable of binding, wherein the binding of the corresponding transcription factor represses downstream gene expression; in the presence of RNS, the transcription factor does not bind to and does not repress the regulatory region. In some embodiments, the RNS-derepressible regulatory region comprises a promoter sequence. The RNS-derepressible regulatory region may be operatively linked to a gene or genes, e.g., a branched chain amino acid catabolism enzymegene sequence(s), BCAA transporter sequence(s), BCAA binding protein(s). For example, in the presence of RNS, a transcription factor senses RNS and no longer binds to and/or represses the regulatory region, thereby derepressing an operatively linked gene sequence or gene cassette. Thus, RNS derepresses expression of the gene or genes.

[0300] As used herein, “RNS-repressible regulatory region” refers to a nucleic acid sequence to which one or more RNS-sensing transcription factors is capable of binding, wherein the binding of the corresponding transcription factor represses downstream gene expression; in the presence of RNS, the transcription factor binds to and represses the regulatory region. In some embodiments, the RNS-repressible regulatory region comprises a promoter sequence. In some embodiments, the transcription factor that senses RNS is capable of binding to a regulatory region that overlaps with part of the promoter sequence. In alternate embodiments, the transcription factor that senses RNS is capable of binding to a regulatory region that is upstream or downstream of the promoter sequence. The RNS-repressible regulatory region may be operatively linked to a gene sequence or gene cassette. For example, in the presence of RNS, a transcription factor senses RNS and binds to a corresponding RNS-repressible regulatory region, thereby blocking expression of an operatively linked gene sequence or gene sequences. Thus, RNS represses expression of the gene or gene sequences.

[0301] As used herein, a “RNS-responsive regulatory region” refers to a RNS-inducible regulatory region, a RNS-repressible regulatory region, and/or a RNS-derepressible regulatory region. In some embodiments, the RNS-responsive regulatory region comprises a promoter sequence. Each regulatory region is capable of binding at least one corresponding RNS-sensing transcription factor. Examples of transcription factors that sense RNS and their corresponding RNS-responsive genes, promoters, and/or regulatory regions include, but are not limited to, those shown in Table 4.

TABLE 4
Examples of RNS-sensing transcription
factors and RNS-responsive genes

| RNS-sensing | Primarily | |
|---|---|---|
| transcription | capable of | Examples of responsive genes, |
| factor: | sensing: | promoters, and/or regulatory regions: |
| NsrR | NO | norB, aniA, nsrR, hmpA, ytfE, |
| | | ygbA, hcp, hcr, nrfA, aox |
| NorR | NO | norVW, norR |
| DNR | NO | norCB, nir, nor, nos |

[0302] In some embodiments, the genetically engineered bacteria of the invention comprise a tunable regulatory region that is directly or indirectly controlled by a transcription factor that is capable of sensing at least one reactive nitrogen species. The tunable regulatory region is operatively linked to a gene or genes capable of directly or indirectly driving the expression of an amino acid catabolism enzyme, BCAA transporter, and/or BCAA binding protein, thus controlling expression of the branched chain amino acid catabolism enzyme, BCAA transporter, and/or BCAA binding protein relative to RNS levels. For example, the tunable regulatory region is a RNS-inducible regulatory region, and the payload is an amino acid catabolism enzyme, BCAA transporter, and/or BCAA binding protein, such as any of the amino acid catabolism enzymes, BCAA transporters, and BCAA binding proteins provided herein; when RNS is present, e.g., in an inflamed tissue, a RNS-sensing transcription factor binds to and/or activates the regulatory region and drives expression of the branched chain amino acid catabolism enzyme, BCAA transporter, and/or BCAA binding protein gene or genes. Subsequently, when inflammation is ameliorated, RNS levels are reduced, and production of the branched chain amino acid catabolism enzyme, BCAA transporter, and/or BCAA binding protein is decreased or eliminated.

[0303] In some embodiments, the tunable regulatory region is a RNS-inducible regulatory region; in the presence of RNS, a transcription factor senses RNS and activates the RNS-inducible regulatory region, thereby driving expression of an operatively linked gene or genes. In some embodiments, the transcription factor senses RNS and subsequently binds to the RNS-inducible regulatory region, thereby activating downstream gene expression. In alternate embodiments, the transcription factor is bound to the RNS-inducible regulatory region in the absence of RNS; when the transcription factor senses RNS, it undergoes a conformational change, thereby inducing downstream gene expression.

[0304] In some embodiments, the tunable regulatory region is a RNS-inducible regulatory region, and the transcription factor that senses RNS is NorR. NorR “is an NO-responsive transcriptional activator that regulates expression of the norVW genes encoding flavorubredoxin and an associated flavoprotein, which reduce NO to nitrous oxide” (Spiro 2006). The genetically engineered bacteria of the invention may comprise any suitable RNS-responsive regulatory region from a gene that is activated by NorR. Genes that are capable of being activated by NorR are known in the art (see, e.g., Spiro 2006; Vine et al., 2011; Karlinsey et al., 2012). In certain embodiments, the genetically engineered bacteria of the invention comprise a RNS-inducible regulatory region from norVW that is operatively linked to a gene or genes, e.g., one or more branched chain amino acid catabolism enzyme, BCAA transporter, and/or BCAA binding protein gene sequence(s). In the presence of RNS, a NorR transcription factor senses RNS and activates to the norVW regulatory region, thereby driving expression of the operatively linked gene(s) and producing the amino acid catabolism enzyme, BCAA transporter, and/or BCAA binding protein.

[0305] In some embodiments, the tunable regulatory region is a RNS-inducible regulatory region, and the transcription factor that senses RNS is DNR. DNR (dissimilatory nitrate respiration regulator) “promotes the expression of the nir, the nor and the nos genes” in the presence of nitric oxide (Castiglione et al., 2009). The genetically engineered bacteria of the invention may comprise any suitable RNS-responsive regulatory region from a gene that is activated by DNR. Genes that are capable of being activated by DNR are known in the art (see, e.g., Castiglione et al., 2009; Giardina et al., 2008; Table 1). In certain embodiments, the genetically engineered bacteria of the invention comprise a RNS-inducible regulatory region from norCB that is operatively linked to a gene or gene cassette, e.g., a butyrogenic gene cassette. In the presence of RNS, a DNR transcription factor senses RNS and activates to the norCB regulatory region, thereby driving expression of the operatively linked gene or genes and producing one or more amino acid catabolism enzymes. In some embodiments, the DNR is Pseudomonas aeruginosa DNR.

[0306] In some embodiments, the tunable regulatory region is a RNS-derepressible regulatory region, and binding of a corresponding transcription factor represses downstream gene expression; in the presence of RNS, the transcription factor no longer binds to the regulatory region, thereby derepressing the operatively linked gene or gene cassette.

[0307] In some embodiments, the tunable regulatory region is a RNS-derepressible regulatory region, and the transcription factor that senses RNS is NsrR. NsrR is “an Rrf2-type transcriptional repressor [that] can sense NO and control the expression of genes responsible for NO metabolism” (Isabella et al., 2009). The genetically engineered bacteria of the invention may comprise any suitable RNS-responsive regulatory region from a gene that is repressed by NsrR. In some embodiments, the NsrR is Neisseria gonorrhoeae NsrR. Genes that are capable of being repressed by NsrR are known in the art (see, e.g., Isabella et al., 2009; Dunn et al., 2010). In certain embodiments, the genetically engineered bacteria of the invention comprise a RNS-derepressible regulatory region from norB that is operatively linked to a gene or genes, e.g., a branched chain amino acid catabolism enzyme gene or genes. In the presence of RNS, an NsrR transcription factor senses RNS and no longer binds to the norB regulatory region, thereby derepressing the operatively linked branched chain amino acid catabolism enzyme, BCAA transporter, and/or BCAA binding protein gene or genes and producing the encoding an amino acid catabolism enzyme(s).

[0308] In some embodiments, it is advantageous for the genetically engineered bacteria to express a RNS-sensing transcription factor that does not regulate the expression of a significant number of native genes in the bacteria. In some embodiments, the genetically engineered bacterium of the invention expresses a RNS-sensing transcription factor from a different species, strain, or substrain of bacteria, wherein the transcription factor does not bind to regulatory sequences in the genetically engineered bacterium of the invention. In some embodiments, the genetically engineered bacterium of the invention is Escherichia coli, and the RNS-sensing transcription factor is NsrR, e.g., from is Neisseria gonorrhoeae, wherein the Escherichia coli does not comprise binding sites for said NsrR. In some embodiments, the heterologous transcription factor minimizes or eliminates off-target effects on endogenous regulatory regions and genes in the genetically engineered bacteria.

[0309] In some embodiments, the tunable regulatory region is a RNS-repressible regulatory region, and binding of a corresponding transcription factor represses downstream gene expression; in the presence of RNS, the transcription factor senses RNS and binds to the RNS-repressible regulatory region, thereby repressing expression of the operatively linked gene or gene cassette. In some embodiments, the RNS-sensing transcription factor is capable of binding to a regulatory region that overlaps with part of the promoter sequence. In alternate embodiments, the RNS-sensing transcription factor is capable of binding to a regulatory region that is upstream or downstream of the promoter sequence.

[0310] In these embodiments, the genetically engineered bacteria may comprise a two repressor activation regulatory circuit, which is used to express an amino acid catabolism enzyme. The two repressor activation regulatory circuit comprises a first RNS-sensing repressor and a second repressor, which is operatively linked to a gene or gene cassette, e.g., encoding an amino acid catabolism enzyme. In one aspect of these embodiments, the RNS-sensing repressor inhibits transcription of the second repressor, which inhibits the transcription of the gene or gene cassette. Examples of second repressors useful in these embodiments include, but are not limited to, TetR, C1, and LexA. In the absence of binding by the first repressor (which occurs in the absence of RNS), the second repressor is transcribed, which represses expression of the gene or genes. In the presence of binding by the first repressor (which occurs in the presence of RNS), expression of the second repressor is repressed, and the gene or genes, e.g., a branched chain amino acid catabolism enzyme, BCAA transporter, and/or BCAA binding protein gene or genes is expressed.

[0311] A RNS-responsive transcription factor may induce, derepress, or repress gene expression depending upon the regulatory region sequence used in the genetically engineered bacteria. One or more types of RNS-sensing transcription factors and corresponding regulatory region sequences may be present in genetically engineered bacteria. In some embodiments, the genetically engineered bacteria comprise one type of RNS-sensing transcription factor, e.g., NsrR, and one corresponding regulatory region sequence, e.g., from norB. In some embodiments, the genetically engineered bacteria comprise one type of RNS-sensing transcription factor, e.g., NsrR, and two or more different corresponding regulatory region sequences, e.g., from norB and aniA. In some embodiments, the genetically engineered bacteria comprise two or more types of RNS-sensing transcription factors, e.g., NsrR and NorR, and two or more corresponding regulatory region sequences, e.g., from norB and norR, respectively. One RNS-responsive regulatory region may be capable of binding more than one transcription factor. In some embodiments, the genetically engineered bacteria comprise two or more types of RNS-sensing transcription factors and one corresponding regulatory region sequence. Nucleic acid sequences of several RNS-regulated regulatory regions are known in the art (see, e.g., Spiro 2006; Isabella et al., 2009; Dunn et al., 2010; Vine et al., 2011; Karlinsey et al., 2012).

[0312] In some embodiments, the genetically engineered bacteria of the invention comprise a gene encoding a RNS-sensing transcription factor, e.g., the nsrR gene, that is controlled by its native promoter, an inducible promoter, a promoter that is stronger than the native promoter, e.g., the GlnRS promoter or the P(Bla) promoter, or a constitutive promoter. In some instances, it may be advantageous to express the RNS-sensing transcription factor under the control of an inducible promoter in order to enhance expression stability. In some embodiments, expression of the RNS-sensing transcription factor is controlled by a different promoter than the promoter that controls expression of the therapeutic molecule. In some embodiments, expression of the RNS-sensing transcription factor is controlled by the same promoter that controls expression of the therapeutic molecule. In some embodiments, the RNS-sensing transcription factor and therapeutic molecule are divergently transcribed from a promoter region.

[0313] In some embodiments, the genetically engineered bacteria of the invention comprise a gene for a RNS-sensing transcription factor from a different species, strain, or substrain of bacteria. In some embodiments, the genetically engineered bacteria comprise a RNS-responsive regulatory region from a different species, strain, or substrain of bacteria. In some embodiments, the genetically engineered bacteria comprise a RNS-sensing transcription factor and corresponding RNS-responsive regulatory region from a different species, strain, or substrain of bacteria. The heterologous RNS-sensing transcription factor and regulatory region may increase the transcription of genes operatively linked to said regulatory region in the presence of RNS, as compared to the native transcription factor and regulatory region from bacteria of the same subtype under the same conditions.

[0314] In some embodiments, the genetically engineered bacteria comprise a RNS-sensing transcription factor, NsrR, and corresponding regulatory region, nsrR, from Neisseria gonorrhoeae. In some embodiments, the native RNS-sensing transcription factor, e.g., NsrR, is left intact and retains wild-type activity. In alternate embodiments, the native RNS-sensing transcription factor, e.g., NsrR, is deleted or mutated to reduce or eliminate wild-type activity.

[0315] In some embodiments, the genetically engineered bacteria of the invention comprise multiple copies of the endogenous gene encoding the RNS-sensing transcription factor, e.g., the nsrR gene. In some embodiments, the gene encoding the RNS-sensing transcription factor is present on a plasmid. In some embodiments, the gene encoding the RNS-sensing transcription factor and the gene or gene cassette for producing the therapeutic molecule are present on different plasmids. In some embodiments, the gene encoding the RNS-sensing transcription factor and the gene or gene cassette for producing the therapeutic molecule are present on the same plasmid. In some embodiments, the gene encoding the RNS-sensing transcription factor is present on a chromosome. In some embodiments, the gene encoding the RNS-sensing transcription factor and the gene or gene cassette for producing the therapeutic molecule are present on different chromosomes. In some embodiments, the gene encoding the RNS-sensing transcription factor and the gene or gene cassette for producing the therapeutic molecule are present on the same chromosome.

[0316] In some embodiments, the genetically engineered bacteria comprise a wild-type gene encoding a RNS-sensing transcription factor, e.g., the NsrR gene, and a corresponding regulatory region, e.g., a norB regulatory region, that is mutated relative to the wild-type regulatory region from bacteria of the same subtype. The mutated regulatory region increases the expression of the branched chain amino acid catabolism enzymein the presence of RNS, as compared to the wild-type regulatory region under the same conditions. In some embodiments, the genetically engineered bacteria comprise a wild-type RNS-responsive regulatory region, e.g., the norB regulatory region, and a corresponding transcription factor, e.g., NsrR, that is mutated relative to the wild-type transcription factor from bacteria of the same subtype. The mutant transcription factor increases the expression of the branched chain amino acid catabolism enzymein the presence of RNS, as compared to the wild-type transcription factor under the same conditions. In some embodiments, both the RNS-sensing transcription factor and corresponding regulatory region are mutated relative to the wild-type sequences from bacteria of the same subtype in order to increase expression of the branched chain amino acid catabolism enzyme, BCAA transporter, and/or BCAA binding protein in the presence of RNS.

[0317] In some embodiments, the gene or gene cassette for producing the anti-inflammation and/or gut barrier function enhancer molecule is present on a plasmid and operably linked to a promoter that is induced by RNS. In some embodiments, expression is further optimized by methods known in the art, e.g., by optimizing ribosomal binding sites, manipulating transcriptional regulators, and/or increasing mRNA stability.

[0318] In some embodiments, any of the gene(s) of the present disclosure may be integrated into the bacterial chromosome at one or more integration sites. For example, one or more copies of a branched chain amino acid catabolism enzyme, BCAA transporter, and/or BCAA binding protein gene(s) may be integrated into the bacterial chromosome. Having multiple copies of the gene or gen(s) integrated into the chromosome allows for greater production of the amino acid catabolism enzyme(s) and also permits fine-tuning of the level of expression. Alternatively, different circuits described herein, such as any of the secretion or exporter circuits, in addition to the therapeutic gene(s) or gene cassette(s) could be integrated into the bacterial chromosome at one or more different integration sites to perform multiple different functions.

[0319] ROS-Dependent Regulation

[0320] In some embodiments, the genetically engineered bacteria comprise a gene for producing an branched chain amino acid catabolism enzyme, BCAA transporter, and/or BCAA binding protein that is expressed under the control of an inducible promoter. In some embodiments, the genetically engineered bacterium that expresses a branched chain amino acid catabolism enzyme, BCAA transporter, and/or BCAA binding protein under the control of a promoter that is activated by conditions of cellular damage. In one embodiment, the gene for producing the branched chain amino acid catabolism enzyme is expressed under the control of a cellular damaged-dependent promoter that is activated in environments in which there is cellular or tissue damage, e.g., a reactive oxygen species or ROS promoter.

[0321] As used herein, “reactive oxygen species” and “ROS” are used interchangeably to refer to highly active molecules, ions, and/or radicals derived from molecular oxygen. ROS can be produced as byproducts of aerobic respiration or metal-catalyzed oxidation and may cause deleterious cellular effects such as oxidative damage. ROS includes, but is not limited to, hydrogen peroxide (H2O2), organic peroxide (ROOH), hydroxyl ion (OH—), hydroxyl radical (.OH), superoxide or superoxide anion (.O2-), singlet oxygen (1O2), ozone (O3), carbonate radical, peroxide or peroxyl radical (.O2-2), hypochlorous acid (HOCl), hypochlorite ion (OCl—), sodium hypochlorite (NaOCl), nitric oxide (NO.), and peroxynitrite or peroxynitrite anion (ONOO—) (unpaired electrons denoted by ⋅). Bacteria have evolved transcription factors that are capable of sensing ROS levels. Different ROS signaling pathways are triggered by different ROS levels and occur with different kinetics (Marinho et al., 2014).

[0322] As used herein, “ROS-inducible regulatory region” refers to a nucleic acid sequence to which one or more ROS-sensing transcription factors is capable of binding, wherein the binding and/or activation of the corresponding transcription factor activates downstream gene expression; in the presence of ROS, the transcription factor binds to and/or activates the regulatory region. In some embodiments, the ROS-inducible regulatory region comprises a promoter sequence. In some embodiments, the transcription factor senses ROS and subsequently binds to the ROS-inducible regulatory region, thereby activating downstream gene expression. In alternate embodiments, the transcription factor is bound to the ROS-inducible regulatory region in the absence of ROS; in the presence of ROS, the transcription factor undergoes a conformational change, thereby activating downstream gene expression. The ROS-inducible regulatory region may be operatively linked to a gene sequence or gene sequence, e.g., a sequence or sequences encoding one or more amino acid catabolism enzyme(s). For example, in the presence of ROS, a transcription factor, e.g., OxyR, senses ROS and activates a corresponding ROS-inducible regulatory region, thereby driving expression of an operatively linked gene sequence or gene sequences. Thus, ROS induces expression of the gene or genes.

[0323] As used herein, “ROS-derepressible regulatory region” refers to a nucleic acid sequence to which one or more ROS-sensing transcription factors is capable of binding, wherein the binding of the corresponding transcription factor represses downstream gene expression; in the presence of ROS, the transcription factor does not bind to and does not repress the regulatory region. In some embodiments, the ROS-derepressible regulatory region comprises a promoter sequence. The ROS-derepressible regulatory region may be operatively linked to a gene or genes, e.g., one or more genes encoding one or more amino acid catabolism enzyme(s). For example, in the presence of ROS, a transcription factor, e.g., OhrR, senses ROS and no longer binds to and/or represses the regulatory region, thereby derepressing an operatively linked gene sequence or gene cassette. Thus, ROS derepresses expression of the gene or gene cassette.

[0324] As used herein, “ROS-repressible regulatory region” refers to a nucleic acid sequence to which one or more ROS-sensing transcription factors is capable of binding, wherein the binding of the corresponding transcription factor represses downstream gene expression; in the presence of ROS, the transcription factor binds to and represses the regulatory region. In some embodiments, the ROS-repressible regulatory region comprises a promoter sequence. In some embodiments, the transcription factor that senses ROS is capable of binding to a regulatory region that overlaps with part of the promoter sequence. In alternate embodiments, the transcription factor that senses ROS is capable of binding to a regulatory region that is upstream or downstream of the promoter sequence. The ROS-repressible regulatory region may be operatively linked to a gene sequence or gene sequences. For example, in the presence of ROS, a transcription factor, e.g., PerR, senses ROS and binds to a corresponding ROS-repressible regulatory region, thereby blocking expression of an operatively linked gene sequence or gene sequences. Thus, ROS represses expression of the gene or genes.

[0325] As used herein, a “ROS-responsive regulatory region” refers to a ROS-inducible regulatory region, a ROS-repressible regulatory region, and/or a ROS-derepressible regulatory region. In some embodiments, the ROS-responsive regulatory region comprises a promoter sequence. Each regulatory region is capable of binding at least one corresponding ROS-sensing transcription factor. Examples of transcription factors that sense ROS and their corresponding ROS-responsive genes, promoters, and/or regulatory regions include, but are not limited to, those shown in Table 5.

TABLE 5
Examples of ROS-sensing transcription
factors and ROS-responsive genes

| ROS-sensing | Primarily | |
|---|---|---|
| transcription | capable of | Examples of responsive genes, |
| factor: | sensing: | promoters, and/or regulatory regions: |
| OxyR | H₂O₂ | ahpC; ahpF; dps; dsbG; fhuF; flu; fur; gor; |
| | | grxA; hemH; katG; oxyS; sufA; sufB; sufC; |
| | | sufD; sufE; sufS; trxC; uxuA; yaaA; yaeH; |
| | | yaiA; ybjM; ydcH; ydeN; ygaQ; yljA; ytfK |
| PerR | H₂O₂ | katA; ahpCF; mrgA; zoaA; fur; |
| | | hemAXCDBL; srfA |
| OhrR | Organic | ohrA |
| | peroxides | |
| | NaOCl | |
| SoxR | •O₂⁻ | soxS |
| | NO• | |
| | (also capable | |
| | of sensing | |
| | H₂O₂) | |
| RosR | H₂O₂ | rbtT; tnp16a; rluC1; tnp5a; mscL; tnp2d; |
| | | phoD; tnp15b; pstA; tnp5b; xylC; gabD1; |
| | | rluC2; cgtS9; azlC; narKGHJI; rosR |

[0326] In some embodiments, the genetically engineered bacteria comprise a tunable regulatory region that is directly or indirectly controlled by a transcription factor that is capable of sensing at least one reactive oxygen species. The tunable regulatory region is operatively linked to a gene or gene cassette capable of directly or indirectly driving the expression of an amino acid catabolism enzyme, thus controlling expression of the branched chain amino acid catabolism enzyme relative to ROS levels. For example, the tunable regulatory region is a ROS-inducible regulatory region, and the molecule is an amino acid catabolism enzyme; when ROS is present, e.g., in an inflamed tissue, a ROS-sensing transcription factor binds to and/or activates the regulatory region and drives expression of the gene sequence for the amino acid catabolism enzyme, BCAA transporter, and/or BCAA binding protein thereby producing the amino acid catabolism enzyme, BCAA transporter, and/or BCAA binding protein. Subsequently, when inflammation is ameliorated, ROS levels are reduced, and production of the branched chain amino acid catabolism enzyme, BCAA transporter, and/or BCAA binding protein is decreased or eliminated.

[0327] In some embodiments, the tunable regulatory region is a ROS-inducible regulatory region; in the presence of ROS, a transcription factor senses ROS and activates the ROS-inducible regulatory region, thereby driving expression of an operatively linked gene or gene cassette. In some embodiments, the transcription factor senses ROS and subsequently binds to the ROS-inducible regulatory region, thereby activating downstream gene expression. In alternate embodiments, the transcription factor is bound to the ROS-inducible regulatory region in the absence of ROS; when the transcription factor senses ROS, it undergoes a conformational change, thereby inducing downstream gene expression.

[0328] In some embodiments, the tunable regulatory region is a ROS-inducible regulatory region, and the transcription factor that senses ROS is OxyR. OxyR “functions primarily as a global regulator of the peroxide stress response” and is capable of regulating dozens of genes, e.g., “genes involved in H2O2 detoxification (katE, ahpCF), heme biosynthesis (hemH), reductant supply (grxA, gor, trxC), thiol-disulfide isomerization (dsbG), Fe-S center repair (sufA-E, sufS), iron binding (yaaA), repression of iron import systems (fur)” and “OxyS, a small regulatory RNA” (Dubbs et al., 2012). The genetically engineered bacteria may comprise any suitable ROS-responsive regulatory region from a gene that is activated by OxyR. Genes that are capable of being activated by OxyR are known in the art (see, e.g., Zheng et al., 2001; Dubbs et al., 2012; Table 1). In certain embodiments, the genetically engineered bacteria of the invention comprise a ROS-inducible regulatory region from oxyS that is operatively linked to a gene, e.g., a branched chain amino acid catabolism enzyme, BCAA transporter, and/or BCAA binding protein gene. In the presence of ROS, e.g., H2O2, an OxyR transcription factor senses ROS and activates to the oxyS regulatory region, thereby driving expression of the operatively linked branched chain amino acid catabolism enzyme, BCAA transporter, and/or BCAA binding protein gene and producing the amino acid catabolism enzyme, BCAA transporter, and/or BCAA binding protein. In some embodiments, OxyR is encoded by an E. coli oxyR gene. In some embodiments, the oxyS regulatory region is an E. coli oxyS regulatory region. In some embodiments, the ROS-inducible regulatory region is selected from the regulatory region of katG, dps, and ahpC.

[0329] In alternate embodiments, the tunable regulatory region is a ROS-inducible regulatory region, and the corresponding transcription factor that senses ROS is SoxR. When SoxR is “activated by oxidation of its [2Fe-2S] cluster, it increases the synthesis of SoxS, which then activates its target gene expression” (Koo et al., 2003). “SoxR is known to respond primarily to superoxide and nitric oxide” (Koo et al., 2003), and is also capable of responding to H₂O₂. The genetically engineered bacteria of the invention may comprise any suitable ROS-responsive regulatory region from a gene that is activated by SoxR. Genes that are capable of being activated by SoxR are known in the art (see, e.g., Koo et al., 2003; Table 1). In certain embodiments, the genetically engineered bacteria of the invention comprise a ROS-inducible regulatory region from soxS that is operatively linked to a gene, e.g., an amino acid catabolism enzyme. In the presence of ROS, the SoxR transcription factor senses ROS and activates the soxS regulatory region, thereby driving expression of the operatively linked branched chain amino acid catabolism enzyme, BCAA transporter, and/or BCAA binding protein gene and producing an amino acid catabolism enzyme, BCAA transporter, and/or BCAA binding protein.

[0330] In some embodiments, the tunable regulatory region is a ROS-derepressible regulatory region, and binding of a corresponding transcription factor represses downstream gene expression; in the presence of ROS, the transcription factor no longer binds to the regulatory region, thereby derepressing the operatively linked gene or gene cassette.

[0331] In some embodiments, the tunable regulatory region is a ROS-derepressible regulatory region, and the transcription factor that senses ROS is OhrR. OhrR “binds to a pair of inverted repeat DNA sequences overlapping the ohrA promoter site and thereby represses the transcription event,” but oxidized OhrR is “unable to bind its DNA target” (Duarte et al., 2010). OhrR is a “transcriptional repressor [that] . . . senses both organic peroxides and NaOCl” (Dubbs et al., 2012) and is “weakly activated by H2O2 but it shows much higher reactivity for organic hydroperoxides” (Duarte et al., 2010). The genetically engineered bacteria of the invention may comprise any suitable ROS-responsive regulatory region from a gene that is repressed by OhrR. Genes that are capable of being repressed by OhrR are known in the art (see, e.g., Dubbs et al., 2012; Table 1). In certain embodiments, the genetically engineered bacteria of the invention comprise a ROS-derepressible regulatory region from ohrA that is operatively linked to a gene or gene cassette, e.g., a branched chain amino acid catabolism enzyme, BCAA transporter, and/or BCAA binding protein gene. In the presence of ROS, e.g., NaOCl, an OhrR transcription factor senses ROS and no longer binds to the ohrA regulatory region, thereby derepressing the operatively linked branched chain amino acid catabolism enzyme, BCAA transporter, and/or BCAA binding protein gene and producing an amino acid catabolism enzyme, BCAA transporter, and/or BCAA binding protein.

[0332] OhrR is a member of the MarR family of ROS-responsive regulators. “Most members of the MarR family are transcriptional repressors and often bind to the −10 or −35 region in the promoter causing a steric inhibition of RNA polymerase binding” (Bussmann et al., 2010). Other members of this family are known in the art and include, but are not limited to, OspR, MgrA, RosR, and SarZ. In some embodiments, the transcription factor that senses ROS is OspR, MgRA, RosR, and/or SarZ, and the genetically engineered bacteria of the invention comprises one or more corresponding regulatory region sequences from a gene that is repressed by OspR, MgRA, RosR, and/or SarZ. Genes that are capable of being repressed by OspR, MgRA, RosR, and/or SarZ are known in the art (see, e.g., Dubbs et al., 2012).

[0333] In some embodiments, the tunable regulatory region is a ROS-derepressible regulatory region, and the corresponding transcription factor that senses ROS is RosR. RosR is “a MarR-type transcriptional regulator” that binds to an “18-bp inverted repeat with the consensus sequence TTGTTGAYRYRTCAACWA (SEQ ID NO: 163)” and is “reversibly inhibited by the oxidant H2O2” (Bussmann et al., 2010). RosR is capable of repressing numerous genes and putative genes, including but not limited to “a putative polyisoprenoid-binding protein (cg1322, gene upstream of and divergent from rosR), a sensory histidine kinase (cgtS9), a putative transcriptional regulator of the Crp/FNR family (cg3291), a protein of the glutathione S-transferase family (cg1426), two putative FMN reductases (cg1150 and cg1850), and four putative monooxygenases (cg0823, cg1848, cg2329, and cg3084)” (Bussmann et al., 2010). The genetically engineered bacteria of the invention may comprise any suitable ROS-responsive regulatory region from a gene that is repressed by RosR. Genes that are capable of being repressed by RosR are known in the art (see, e.g., Bussmann et al., 2010; Table 1). In certain embodiments, the genetically engineered bacteria of the invention comprise a ROS-derepressible regulatory region from cgtS9 that is operatively linked to a gene or gene cassette, e.g., an amino acid catabolism enzyme, BCAA transporter, and/or BCAA binding protein. In the presence of ROS, e.g., H2O2, a RosR transcription factor senses ROS and no longer binds to the cgtS9 regulatory region, thereby derepressing the operatively linked branched chain amino acid catabolism enzyme, BCAA transporter, and/or BCAA binding protein gene and producing the amino acid catabolism enzyme, BCAA transporter, and/or BCAA binding protein.

[0334] In some embodiments, it is advantageous for the genetically engineered bacteria to express a ROS-sensing transcription factor that does not regulate the expression of a significant number of native genes in the bacteria. In some embodiments, the genetically engineered bacterium of the invention expresses a ROS-sensing transcription factor from a different species, strain, or substrain of bacteria, wherein the transcription factor does not bind to regulatory sequences in the genetically engineered bacterium of the invention. In some embodiments, the genetically engineered bacterium of the invention is Escherichia coli, and the ROS-sensing transcription factor is RosR, e.g., from Corynebacterium glutamicum, wherein the Escherichia coli does not comprise binding sites for said RosR. In some embodiments, the heterologous transcription factor minimizes or eliminates off-target effects on endogenous regulatory regions and genes in the genetically engineered bacteria.

[0335] In some embodiments, the tunable regulatory region is a ROS-repressible regulatory region, and binding of a corresponding transcription factor represses downstream gene expression; in the presence of ROS, the transcription factor senses ROS and binds to the ROS-repressible regulatory region, thereby repressing expression of the operatively linked gene or gene cassette. In some embodiments, the ROS-sensing transcription factor is capable of binding to a regulatory region that overlaps with part of the promoter sequence. In alternate embodiments, the ROS-sensing transcription factor is capable of binding to a regulatory region that is upstream or downstream of the promoter sequence.

[0336] In some embodiments, the tunable regulatory region is a ROS-repressible regulatory region, and the transcription factor that senses ROS is PerR. In Bacillus subtilis, PerR “when bound to DNA, represses the genes coding for proteins involved in the oxidative stress response (katA, ahpC, and mrgA), metal homeostasis (hemAXCDBL, fur, and zoaA) and its own synthesis (perR)” (Marinho et al., 2014). PerR is a “global regulator that responds primarily to H2O2” (Dubbs et al., 2012) and “interacts with DNA at the per box, a specific palindromic consensus sequence (TTATAATNATTATAA (SEQ ID NO: 164)) residing within and near the promoter sequences of PerR-controlled genes” (Marinho et al., 2014). PerR is capable of binding a regulatory region that “overlaps part of the promoter or is immediately downstream from it” (Dubbs et al., 2012). The genetically engineered bacteria of the invention may comprise any suitable ROS-responsive regulatory region from a gene that is repressed by PerR. Genes that are capable of being repressed by PerR are known in the art (see, e.g., Dubbs et al., 2012).

[0337] In these embodiments, the genetically engineered bacteria may comprise a two repressor activation regulatory circuit, which is used to express an amino acid catabolism enzyme. The two repressor activation regulatory circuit comprises a first ROS-sensing repressor, e.g., PerR, and a second repressor, e.g., TetR, which is operatively linked to a gene or gene cassette, e.g., an amino acid catabolism enzyme. In one aspect of these embodiments, the ROS-sensing repressor inhibits transcription of the second repressor, which inhibits the transcription of the gene or gene cassette. Examples of second repressors useful in these embodiments include, but are not limited to, TetR, C1, and LexA. In some embodiments, the ROS-sensing repressor is PerR. In some embodiments, the second repressor is TetR. In this embodiment, a PerR-repressible regulatory region drives expression of TetR, and a TetR-repressible regulatory region drives expression of the gene or gene cassette, e.g., an amino acid catabolism enzyme. In the absence of PerR binding (which occurs in the absence of ROS), tetR is transcribed, and TetR represses expression of the gene or gene cassette, e.g., an amino acid catabolism enzyme. In the presence of PerR binding (which occurs in the presence of ROS), tetR expression is repressed, and the gene or gene cassette, e.g., an amino acid catabolism enzyme, BCAA transporter, and/or BCAA binding protein is expressed.

[0338] A ROS-responsive transcription factor may induce, derepress, or repress gene expression depending upon the regulatory region sequence used in the genetically engineered bacteria. For example, although “OxyR is primarily thought of as a transcriptional activator under oxidizing conditions . . . OxyR can function as either a repressor or activator under both oxidizing and reducing conditions” (Dubbs et al., 2012), and OxyR “has been shown to be a repressor of its own expression as well as that of fhuF (encoding a ferric ion reductase) and flu (encoding the antigen 43 outer membrane protein)” (Zheng et al., 2001). The genetically engineered bacteria of the invention may comprise any suitable ROS-responsive regulatory region from a gene that is repressed by OxyR. In some embodiments, OxyR is used in a two repressor activation regulatory circuit, as described above. Genes that are capable of being repressed by OxyR are known in the art (see, e.g., Zheng et al., 2001; Table 1). Or, for example, although RosR is capable of repressing a number of genes, it is also capable of activating certain genes, e.g., the narKGHJI operon. In some embodiments, the genetically engineered bacteria comprise any suitable ROS-responsive regulatory region from a gene that is activated by RosR. In addition, “PerR-mediated positive regulation has also been observed . . . and appears to involve PerR binding to distant upstream sites” (Dubbs et al., 2012). In some embodiments, the genetically engineered bacteria comprise any suitable ROS-responsive regulatory region from a gene that is activated by PerR.

[0339] One or more types of ROS-sensing transcription factors and corresponding regulatory region sequences may be present in genetically engineered bacteria. For example, “OhrR is found in both Gram-positive and Gram-negative bacteria and can coreside with either OxyR or PerR or both” (Dubbs et al., 2012). In some embodiments, the genetically engineered bacteria comprise one type of ROS-sensing transcription factor, e.g., OxyR, and one corresponding regulatory region sequence, e.g., from oxyS. In some embodiments, the genetically engineered bacteria comprise one type of ROS-sensing transcription factor, e.g., OxyR, and two or more different corresponding regulatory region sequences, e.g., from oxyS and katG. In some embodiments, the genetically engineered bacteria comprise two or more types of ROS-sensing transcription factors, e.g., OxyR and PerR, and two or more corresponding regulatory region sequences, e.g., from oxyS and katA, respectively. One ROS-responsive regulatory region may be capable of binding more than one transcription factor. In some embodiments, the genetically engineered bacteria comprise two or more types of ROS-sensing transcription factors and one corresponding regulatory region sequence.

[0340] In some embodiments, genetically engineered bacteria comprise a nucleic acid sequence that is at least about 80%, at least about 85%, at least about 90%, at least about 95%, or at least about 99% homologous to the DNA sequence of an exemplary OxyR-regulated regulatory region, or a functional fragment thereof. Such sequences include, but are not limited to aktG, dps, ahpC, and oxyS.

[0341] In some embodiments, the genetically engineered bacteria of the invention comprise a gene encoding a ROS-sensing transcription factor, e.g., the oxyR gene, that is controlled by its native promoter, an inducible promoter, a promoter that is stronger than the native promoter, e.g., the GlnRS promoter or the P(Bla) promoter, or a constitutive promoter. In some instances, it may be advantageous to express the ROS-sensing transcription factor under the control of an inducible promoter in order to enhance expression stability. In some embodiments, expression of the ROS-sensing transcription factor is controlled by a different promoter than the promoter that controls expression of the therapeutic molecule. In some embodiments, expression of the ROS-sensing transcription factor is controlled by the same promoter that controls expression of the therapeutic molecule. In some embodiments, the ROS-sensing transcription factor and therapeutic molecule are divergently transcribed from a promoter region.

[0342] In some embodiments, the genetically engineered bacteria of the invention comprise a gene for a ROS-sensing transcription factor from a different species, strain, or substrain of bacteria. In some embodiments, the genetically engineered bacteria comprise a ROS-responsive regulatory region from a different species, strain, or substrain of bacteria. In some embodiments, the genetically engineered bacteria comprise a ROS-sensing transcription factor and corresponding ROS-responsive regulatory region from a different species, strain, or substrain of bacteria. The heterologous ROS-sensing transcription factor and regulatory region may increase the transcription of genes operatively linked to said regulatory region in the presence of ROS, as compared to the native transcription factor and regulatory region from bacteria of the same subtype under the same conditions.

[0343] In some embodiments, the genetically engineered bacteria comprise a ROS-sensing transcription factor, OxyR, and corresponding regulatory region, oxyS, from Escherichia coli. In some embodiments, the native ROS-sensing transcription factor, e.g., OxyR, is left intact and retains wild-type activity. In alternate embodiments, the native ROS-sensing transcription factor, e.g., OxyR, is deleted or mutated to reduce or eliminate wild-type activity.

[0344] In some embodiments, the genetically engineered bacteria of the invention comprise multiple copies of the endogenous gene encoding the ROS-sensing transcription factor, e.g., the oxyR gene. In some embodiments, the gene encoding the ROS-sensing transcription factor is present on a plasmid. In some embodiments, the gene encoding the ROS-sensing transcription factor and the gene or gene cassette for producing the therapeutic molecule are present on different plasmids. In some embodiments, the gene encoding the ROS-sensing transcription factor and the gene or gene cassette for producing the therapeutic molecule are present on the same. In some embodiments, the gene encoding the ROS-sensing transcription factor is present on a chromosome. In some embodiments, the gene encoding the ROS-sensing transcription factor and the gene or gene cassette for producing the therapeutic molecule are present on different chromosomes. In some embodiments, the gene encoding the ROS-sensing transcription factor and the gene or gene cassette for producing the therapeutic molecule are present on the same chromosome.

[0345] In some embodiments, the genetically engineered bacteria comprise a wild-type gene encoding a ROS-sensing transcription factor, e.g., the soxR gene, and a corresponding regulatory region, e.g., a soxS regulatory region, that is mutated relative to the wild-type regulatory region from bacteria of the same subtype. The mutated regulatory region increases the expression of the branched chain amino acid catabolism enzyme, BCAA transporter, and/or BCAA binding protein in the presence of ROS, as compared to the wild-type regulatory region under the same conditions. In some embodiments, the genetically engineered bacteria comprise a wild-type ROS-responsive regulatory region, e.g., the oxyS regulatory region, and a corresponding transcription factor, e.g., OxyR, that is mutated relative to the wild-type transcription factor from bacteria of the same subtype. The mutant transcription factor increases the expression of the branched chain amino acid catabolism enzyme, BCAA transporter, and/or BCAA binding protein in the presence of ROS, as compared to the wild-type transcription factor under the same conditions. In some embodiments, both the ROS-sensing transcription factor and corresponding regulatory region are mutated relative to the wild-type sequences from bacteria of the same subtype in order to increase expression of the branched chain amino acid catabolism enzymein the presence of ROS.

[0346] In some embodiments, the gene or gene cassette for producing the branched chain amino acid catabolism enzyme is present on a plasmid and operably linked to a promoter that is induced by ROS. In some embodiments, the gene or gene cassette for producing the branched chain amino acid catabolism enzyme is present in the chromosome and operably linked to a promoter that is induced by ROS. In some embodiments, the gene or gene cassette for producing the branched chain amino acid catabolism enzyme is present on a chromosome and operably linked to a promoter that is induced by exposure to tetracycline. In some embodiments, the gene or gene cassette for producing the branched chain amino acid catabolism enzyme, BCAA transporter, and/or BCAA binding protein is present on a plasmid and operably linked to a promoter that is induced by exposure to tetracycline. In some embodiments, expression is further optimized by methods known in the art, e.g., by optimizing ribosomal binding sites, manipulating transcriptional regulators, and/or increasing mRNA stability.

[0347] In some embodiments, the genetically engineered bacteria may comprise multiple copies of the gene(s) capable of producing an amino acid catabolism enzyme(s), BCAA transporter(s), and/or BCAA binding protein(s). In some embodiments, the gene(s) capable of producing an amino acid catabolism enzyme(s), BCAA transporter(s), and/or BCAA binding protein(s) is present on a plasmid and operatively linked to a ROS-responsive regulatory region. In some embodiments, the gene(s) capable of producing a branched chain amino acid catabolism enzyme, BCAA transporter, and/or BCAA binding protein is present in a chromosome and operatively linked to a ROS-responsive regulatory region.

[0348] Thus, in some embodiments, the genetically engineered bacteria or genetically engineered yeast or virus produce one or more amino acid catabolism enzymes under the control of an oxygen level-dependent promoter, a reactive oxygen species (ROS)-dependent promoter, or a reactive nitrogen species (RNS)-dependent promoter, and a corresponding transcription factor.

[0349] In some embodiments, the genetically engineered bacteria comprise a stably maintained plasmid or chromosome carrying a gene for producing an amino acid catabolism enzyme, BCAA transporter, and/or BCAA binding protein such that the branched chain amino acid catabolism enzyme, BCAA transporter, and/or BCAA binding protein can be expressed in the host cell, and the host cell is capable of survival and/or growth in vitro, e.g., in medium, and/or in vivo. In some embodiments, a bacterium may comprise multiple copies of the gene encoding the amino acid catabolism enzyme, BCAA transporter, and/or BCAA binding protein. In some embodiments, the gene encoding the branched chain amino acid catabolism enzyme, BCAA transporter, and/or BCAA binding protein is expressed on a low-copy plasmid. In some embodiments, the low-copy plasmid may be useful for increasing stability of expression. In some embodiments, the low-copy plasmid may be useful for decreasing leaky expression under non-inducing conditions. In some embodiments, the gene encoding the branched chain amino acid catabolism enzyme, BCAA transporter, and/or BCAA binding protein is expressed on a high-copy plasmid. In some embodiments, the high-copy plasmid may be useful for increasing expression of the amino acid catabolism enzyme, BCAA transporter, and/or BCAA binding protein. In some embodiments, the gene encoding the branched chain amino acid catabolism enzyme, BCAA transporter, and/or BCAA binding protein is expressed on a chromosome.

[0350] In some embodiments, the bacteria are genetically engineered to include multiple mechanisms of action (MOAs), e.g., circuits producing multiple copies of the same product (e.g., to enhance copy number) or circuits performing multiple different functions. For example, the genetically engineered bacteria may include four copies of the gene encoding a particular branched chain amino acid catabolism enzyme, BCAA transporter, and/or BCAA binding protein inserted at four different insertion sites. Alternatively, the genetically engineered bacteria may include three copies of the gene encoding a particular branched chain amino acid catabolism enzyme, BCAA transporter, and/or BCAA binding protein inserted at three different insertion sites and three copies of the gene encoding a different branched chain amino acid catabolism enzyme, BCAA transporter, and/or BCAA binding protein inserted at three different insertion sites.

[0351] In some embodiments, under conditions where the branched chain amino acid catabolism enzyme, BCAA transporter, and/or BCAA binding protein is expressed, the genetically engineered bacteria of the disclosure produce at least about 1.5-fold, at least about 2-fold, at least about 10-fold, at least about 15-fold, at least about 20-fold, at least about 30-fold, at least about 50-fold, at least about 100-fold, at least about 200-fold, at least about 300-fold, at least about 400-fold, at least about 500-fold, at least about 600-fold, at least about 700-fold, at least about 800-fold, at least about 900-fold, at least about 1,000-fold, or at least about 1,500-fold more of the amino acid catabolism enzyme, BCAA transporter, and/or BCAA binding protein and/or transcript of the gene(s) in the operon as compared to unmodified bacteria of the same subtype under the same conditions.

[0352] In some embodiments, quantitative PCR (qPCR) is used to amplify, detect, and/or quantify mRNA expression levels of the branched chain amino acid catabolism enzyme, BCAA transporter, and/or BCAA binding protein gene(s). Primers specific for branched chain amino acid catabolism enzyme, BCAA transporter, and/or BCAA binding protein gene(s) may be designed and used to detect mRNA in a sample according to methods known in the art. In some embodiments, a fluorophore is added to a sample reaction mixture that may contain branched chain amino acid catabolism enzyme mRNA, and a thermal cycler is used to illuminate the sample reaction mixture with a specific wavelength of light and detect the subsequent emission by the fluorophore. The reaction mixture is heated and cooled to predetermined temperatures for predetermined time periods. In certain embodiments, the heating and cooling is repeated for a predetermined number of cycles. In some embodiments, the reaction mixture is heated and cooled to 90-100° C., 60-70° C., and 30-50° C. for a predetermined number of cycles. In a certain embodiment, the reaction mixture is heated and cooled to 93-97° C., 55-65° C., and 35-45° C. for a predetermined number of cycles. In some embodiments, the accumulating amplicon is quantified after each cycle of the qPCR. The number of cycles at which fluorescence exceeds the threshold is the threshold cycle (CT). At least one CT result for each sample is generated, and the CT result(s) may be used to determine mRNA expression levels of the branched chain amino acid catabolism enzyme, BCAA transporter, and/or BCAA binding protein gene(s).

[0353] In some embodiments, quantitative PCR (qPCR) is used to amplify, detect, and/or quantify mRNA expression levels of the branched chain amino acid catabolism enzyme, BCAA transporter, and/or BCAA binding protein gene(s). Primers specific for branched chain amino acid catabolism enzyme, BCAA transporter, and/or BCAA binding protein gene(s) may be designed and used to detect mRNA in a sample according to methods known in the art. In some embodiments, a fluorophore is added to a sample reaction mixture that may contain branched chain amino acid catabolism enzyme, BCAA transporter, and/or BCAA binding protein mRNA, and a thermal cycler is used to illuminate the sample reaction mixture with a specific wavelength of light and detect the subsequent emission by the fluorophore. The reaction mixture is heated and cooled to predetermined temperatures for predetermined time periods. In certain embodiments, the heating and cooling is repeated for a predetermined number of cycles. In some embodiments, the reaction mixture is heated and cooled to 90-100° C., 60-70° C., and 30-50° C. for a predetermined number of cycles. In a certain embodiment, the reaction mixture is heated and cooled to 93-97° C., 55-65° C., and 35-45° C. for a predetermined number of cycles. In some embodiments, the accumulating amplicon is quantified after each cycle of the qPCR. The number of cycles at which fluorescence exceeds the threshold is the threshold cycle (CT). At least one CT result for each sample is generated, and the CT result(s) may be used to determine mRNA expression levels of the branched chain amino acid catabolism enzyme, BCAA transporter, and/or BCAA binding protein gene(s).

[0354] In other embodiments, the inducible promoter is a propionate responsive promoter. For example, the prpR promoter is a propionate responsive promoter.

[0355] Inducible Promoters (Nutritional and or Chemical Inducer(s) and or Metabolite(s))

[0356] In some embodiments, one or more optimized gene sequence(s), e.g., kivD, leuDH, adh2, and brnQ, is present on a plasmid and operably linked to promoter a directly or indirectly inducible by one or more nutritional and/or chemical inducer(s) and/or metabolite(s). In some embodiments, the bacterial cell comprises a stably maintained plasmid or chromosome carrying the gene encoding the branched chain amino acid catabolism enzyme, which is induced by one or more nutritional and/or chemical inducer(s) and/or metabolite(s), such that the branched chain amino acid catabolism enzyme can be expressed in the host cell, and the host cell is capable of survival and/or growth in vitro, e.g., under culture conditions, and/or in vivo, e.g., in the gut. In some embodiments, bacterial cell comprises two or more distinct branched chain amino acid catabolism cassette(s), one or more of which are induced by one or more nutritional and/or chemical inducer(s) and/or metabolite(s). In some embodiments, the genetically engineered bacteria comprise multiple copies of the same branched chain amino acid catabolism enzyme gene(s) and/or gene cassette(s) which are induced by one or more nutritional and/or chemical inducer(s) and/or metabolite(s). In some embodiments, the genetically engineered bacteria comprise multiple copies of different branched chain amino acid catabolism enzyme genes or gene cassette(s), one or more of which are induced by one or more nutritional and/or chemical inducer(s) and/or metabolite(s).

[0357] In some embodiments, the gene encoding the branched chain amino acid catabolism enzyme is present on a plasmid and operably linked to a promoter that is induced by one or more nutritional and/or chemical inducer(s) and/or metabolite(s). In some embodiments, the gene encoding the branched chain amino acid catabolism enzyme is present in the chromosome and operably linked to a promoter that is induced by one or more nutritional and/or chemical inducer(s) and/or metabolite(s).

[0358] In some embodiments, the bacterial cell comprises a stably maintained plasmid or chromosome carrying the one or more gene sequences(s), inducible by one or more nutritional and/or chemical inducer(s) and/or metabolite(s), encoding a transporter of branched chain amino acid(s) and/or one or more metabolites thereof, e.g., livKHMGF and/or brnQ, such that the transporter can be expressed in the host cell, and the host cell is capable of survival and/or growth in vitro, e.g., in medium, and/or in vivo, e.g., in the gut. In some embodiments, bacterial cell comprises two or more distinct copies of the one or more gene sequences(s) encoding a branched chain amino acid transporter, which is controlled by a promoter inducible one or more nutritional and/or chemical inducer(s) and/or metabolite(s). In some embodiments, the genetically engineered bacteria comprise multiple copies of the same one or more gene sequences(s) encoding a branched chain amino acid transporter, which is controlled by a promoter inducible one or more nutritional and/or chemical inducer(s) and/or metabolite(s). In some embodiments, the one or more gene sequences(s) encoding a transporter of branched chain amino acid(s), is present on a plasmid and operably linked to a directly or indirectly inducible promoter inducible by one or more nutritional and/or chemical inducer(s) and/or metabolite(s). In some embodiments, the one or more gene sequences(s) encoding a branched chain amino acid transporter, is present on a chromosome and operably linked to a directly or indirectly inducible by one or more nutritional and/or chemical inducer(s) and/or metabolite(s).

[0359] In some embodiments, the gene encoding branched chain amino acid binding protein is present on a plasmid and operably linked to a promoter that is induced by one or more nutritional and/or chemical inducer(s) and/or metabolite(s). In some embodiments, the gene encoding branched chain amino acid binding protein is present in the chromosome and operably linked to a promoter that is induced by one or more nutritional and/or chemical inducer(s) and/or metabolite(s).

[0360] In some embodiments, the promoter that is operably linked to the gene encoding the branched chain amino acid catabolism enzyme and the promoter that is operably linked to the gene encoding the branched chain amino acid transporter and/or BCAA binding protein and/or BCAA exporter, is directly or indirectly induced by one or more nutritional and/or chemical inducer(s) and/or metabolite(s).

[0361] In some embodiments, one or more inducible promoter(s) are useful for or induced during in vivo expression of the one or more protein(s) of interest. In some embodiments, the promoters are induced during in vivo expression of one or more branched chain amino acid catabolism enzymes and/or branched chain amino acid transporter(s) and/or BCAA binding protein(s) and/or BCAA exporter(s). In some embodiments, expression of one or more branched chain amino acid catabolism enzyme(s) and/or branched chain amino acid transporter(s) and/or BCAA binding protein(s) and/or BCAA exporter(s) is driven directly or indirectly by one or more arabinose inducible promoter(s) in vivo. In some embodiments, the promoter is directly or indirectly induced by a chemical and/or nutritional inducer and/or metabolite which is co-administered with the genetically engineered bacteria of the invention.

[0362] In some embodiments, expression of one or more branched chain amino acid catabolism enzyme gene(s) and/or branched chain amino acid transporter(s) and/or BCAA binding protein(s) and/or BCAA exporter(s), is driven directly or indirectly by one or more promoter(s) induced by a chemical and/or nutritional inducer and/or metabolite during in vitro growth, preparation, or manufacturing of the strain prior to in vivo administration. In some embodiments, the promoter(s) induced by a chemical and/or nutritional inducer and/or metabolite are induced in culture, e.g., grown in a flask, fermenter or other appropriate culture vessel, e.g., used during cell growth, cell expansion, fermentation, recovery, purification, formulation, and/or manufacture. In some embodiments, the promoter is directly or indirectly induced by a molecule that is added to in the bacterial culture to induce expression and pre-load the bacterium with branched chain amino acid catabolism enzyme(s) and/or branched chain amino acid transporter(s) and/or BCAA binding protein(s) and/or BCAA exporter(s) prior to administration. In some embodiments, the cultures, which are induced by a chemical and/or nutritional inducer and/or metabolite, are grown aerobically. In some embodiments, the cultures, which are induced by a chemical and/or nutritional inducer and/or metabolite, are grown anaerobically.

[0363] In some embodiments, the genetically engineered bacteria encode one or more gene sequence(s) which are inducible through an arabinose inducible system.

[0364] The genes of arabinose metabolism are organized in one operon, AraBAD, which is controlled by the PAraBAD promoter. The PAraBAD (or Para) promoter suitably fulfills the criteria of inducible expression systems. PAraBAD displays tighter control of payload gene expression than many other systems, likely due to the dual regulatory role of AraC, which functions both as an inducer and as a repressor. Additionally, the level of ParaBAD-based expression can be modulated over a wide range of L-arabinose concentrations to fine-tune levels of expression of the payload. However, the cell population exposed to sub-saturating L-arabinose concentrations is divided into two subpopulations of induced and uninduced cells, which is determined by the differences between individual cells in the availability of L-arabinose transporter (Zhang et al., Development and Application of an Arabinose-Inducible Expression System by Facilitating Inducer Uptake in Corynebacterium glutamicum; Appl. Environ. Microbiol. August 2012 vol. 78 no. 16 5831-5838). Alternatively, inducible expression from the ParaBad can be controlled or fine-tuned through the optimization of the ribosome binding site (RBS), as described herein.

[0365] In one embodiment, expression of one or more optimized enzyme(s), e.g., kivD, leuDH, adh2, and/or brnQ, e.g., as described herein, is driven directly or indirectly by one or more arabinose inducible promoter(s). In one embodiment, the genetically engineered bacteria encode one or more branched chain amino acid transporter(s) e.g., livKHMGF and/or brnQ, described herein, whose expression is driven directly or indirectly by one or more arabinose inducible promoter(s). In one embodiment, expression of one or more branched chain amino acid exporter(s), e.g., as described herein, is driven directly or indirectly by one or more arabinose inducible promoter(s). In some embodiments, the arabinose inducible promoter is useful for or induced during in vivo expression of the one or more protein(s) of interest. In some embodiments, expression of one or more branched chain amino acid catabolism enzyme(s) and/or branched chain amino acid transporter(s) and/or BCAA binding protein(s) and/or BCAA exporter(s) is driven directly or indirectly by one or more arabinose inducible promoter(s) in vivo. In some embodiments, the promoter is directly or indirectly induced by a molecule (e.g., arabinose) that is co-administered with the genetically engineered bacteria of the invention.

[0366] In some embodiments, expression of one or more branched chain amino acid catabolism enzyme(s) and/or branched chain amino acid transporter(s) and/or BCAA binding protein(s) and/or BCAA exporter(s), is driven directly or indirectly by one or more arabinose inducible promoter(s) during in vitro growth, preparation, or manufacturing of the strain prior to in vivo administration. In some embodiments, the arabinose inducible promoter(s) are induced in culture, e.g., grown in a flask, fermenter or other appropriate culture vessel, e.g., used during cell growth, cell expansion, fermentation, recovery, purification, formulation, and/or manufacture. In some embodiments, the promoter is directly or indirectly induced by a molecule, e.g., arabinose, that is added to in the bacterial culture to induce expression and pre-load the bacterium with branched chain amino acid catabolism enzyme(s) and/or branched chain amino acid transporter(s) and/or BCAA binding protein(s) and/or BCAA exporter(s) prior to administration. In some embodiments, the cultures, which are induced by arabinose, are grown aerobically. In some embodiments, the cultures, which are induced by arabinose, are grown anaerobically.

[0367] In some embodiments, bacterial cell comprises two or more distinct branched chain amino acid catabolism cassette(s) or transporter(s) or binding protein(s) or exporter(s), one or more of which are induced by arabinose. In some embodiments, the genetically engineered bacteria comprise multiple copies of the same branched chain amino acid catabolism enzyme gene sequence(s) and/or transporter gene sequence(s), e.g., as described herein, which are induced by one or more nutritional and/or chemical inducer(s) and/or metabolite(s). In some embodiments, the genetically engineered bacteria comprise multiple copies of different branched chain amino acid catabolism enzyme genes sequence(s) and/or transporter gene sequence(s) and/or BCAA binding protein gene sequence(s) and/or BCAA exporter gene sequence(s), e.g., as described herein, one or more of which are induced by one or more nutritional and/or chemical inducer(s) and/or metabolite(s).

[0368] In a first example, the arabinose inducible promoter drives the expression of a construct comprising one or more polypeptides of interest described herein jointly with a second promoter, e.g., a second constitutive or inducible promoter. In some embodiments, two promoters are positioned proximally to the construct and drive its expression, wherein the arabinose inducible promoter drives expression under a first set of exogenous conditions, and the second promoter drives the expression under a second set of exogenous conditions. In second example, the arabinose promoter drives the expression of one or more gene cassette(s) under a first inducing condition and another inducible promoter drives the expression of one or more of the same or different gene cassette(s) expressing one or more polypeptides of interest, under a second inducing condition. In both examples, the first and second conditions can be two sequential inducing culture conditions (i.e., during preparation of the culture in a flask, fermenter or other appropriate culture vessel, e.g., arabinose and IPTG). In another non-limiting example, the first inducing conditions are culture conditions, e.g., the presence of arabinose, and the second inducing conditions are in vivo conditions. Such in vivo conditions include low-oxygen, microaerobic, or anaerobic conditions, presence of gut metabolites, and/or nutritional and/or chemical inducers and/or metabolites administered in combination with the bacterial strain. In some embodiments, the one or more arabinose promoters drive expression of one or more protein(s) of interest, in combination with the FNR promoter driving the expression of the same gene sequence(s).

[0369] In some embodiments, the gene sequence(s) encoding the branched chain amino acid catabolism enzyme(s) or other polypeptide(s) of interest, are present on a plasmid and operably linked to a promoter that is induced by arabinose. In some embodiments, the gene sequence(s) encoding the branched chain amino acid catabolism enzyme(s) or branched chain amino acid transporter(s) is present in the chromosome and operably linked to a promoter that is induced by arabinose.

[0370] In some embodiments, the arabinose inducible construct further comprises a gene encoding AraC, which is divergently transcribed from the same promoter as the one or more one or more branched chain amino acid catabolism enzyme(s).

[0371] In some embodiments, the genetically engineered bacteria comprise one or more gene sequence(s) which are inducible through a rhamnose inducible system. The genes rhaBAD are organized in one operon which is controlled by the rhaP BAD promoter. The rhaP BAD promoter is regulated by two activators, RhaS and RhaR, and the corresponding genes belong to one transcription unit which divergently transcribed in the opposite direction of rhaBAD. In the presence of L-rhamnose, RhaR binds to the rhaP RS promoter and activates the production of RhaR and RhaS. RhaS together with L-rhamnose then bind to the rhaP BAD and the rhaP T promoter and activate the transcription of the structural genes. In contrast to the arabinose system, in which AraC is provided and divergently transcribed in the gene sequence(s), it is not necessary to express the regulatory proteins in larger quantities in the rhamnose expression system because the amounts expressed from the chromosome are sufficient to activate transcription even on multi-copy plasmids. Therefore, only the rhaP BAD promoter is cloned upstream of the gene that is to be expressed. Full induction of rhaBAD transcription also requires binding of the CRP-cAMP complex, which is a key regulator of catabolite repression. Alternatively, inducible expression from the rhaBAD can be controlled or fine-tuned through the optimization of the ribosome binding site (RBS), as described herein.

[0372] In one embodiment, expression of one or more branched chain amino acid catabolism enzyme(s), e.g., kivD, leuDH, adh2, and/or brnQ, e.g., as described herein, is driven directly or indirectly by one or more rhamnose inducible promoter(s). In one embodiment, the genetically engineered bacteria encode one or more branched chain amino acid transporter(s), e.g., livKHMGF and/or brnQ, described herein, whose expression is driven directly or indirectly by one or more rhamnose inducible promoter(s). In one embodiment, the genetically engineered bacteria encode one or more branched chain amino acid exporter(s), described herein, whose expression is driven directly or indirectly by one or more rhamnose inducible promoter(s).

[0373] In some embodiments, the rhamnose inducible promoter is useful for or induced during in vivo expression of the one or more protein(s) of interest. In some embodiments, expression of one or more branched chain amino acid catabolism enzyme(s) and/or branched chain amino acid transporter(s) and/or BCAA binding protein(s) and/or BCAA exporter(s) is driven directly or indirectly by one or more rhamnose inducible promoter(s) in vivo. In some embodiments, the promoter is directly or indirectly induced by a molecule (e.g., rhamnose) that is co-administered with the genetically engineered bacteria of the invention.

[0374] In some embodiments, expression of one or more branched chain amino acid catabolism enzyme(s) and/or branched chain amino acid transporter(s) and/or BCAA binding protein(s) and/or BCAA exporter(s), is driven directly or indirectly by one or more rhamnose inducible promoter(s) during in vitro growth, preparation, or manufacturing of the strain prior to in vivo administration. In some embodiments, the rhamnose inducible promoter(s) are induced in culture, e.g., grown in a flask, fermenter or other appropriate culture vessel, e.g., used during cell growth, cell expansion, fermentation, recovery, purification, formulation, and/or manufacture. In some embodiments, the promoter is directly or indirectly induced by a molecule, e.g., rhamnose, that is added to in the bacterial culture to induce expression and pre-load the bacterium with branched chain amino acid catabolism enzyme(s) and/or BCAA transporter(s) and/or BCAA binding protein(s) and/or BCAA exporter(s) prior to administration. In some embodiments, the cultures, which are induced by rhamnose, are grown aerobically. In some embodiments, the cultures, which are induced by rhamnose, are grown anaerobically.

[0375] In some embodiments, bacterial cell comprises two or more distinct branched chain amino acid catabolism cassette(s) or other polypeptide(s) of interest, one or more of which are induced by rhamnose. In some embodiments, the genetically engineered bacteria comprise multiple copies of the same branched chain amino acid catabolism enzyme gene sequence(s) and/or transporter gene sequence(s) and/or BCAA binding protein gene sequence(s) and/or BCAA exporter gene sequence(s), e.g., as described herein, which are induced by rhamnose. In some embodiments, the genetically engineered bacteria comprise multiple copies of different branched chain amino acid catabolism enzyme genes sequence(s) and/or transporter gene sequence(s) and/or BCAA binding protein gene sequence(s) and/or BCAA exporter gene sequence(s), e.g., as described herein, one or more of which are induced by rhamnose.

[0376] In a first example, the rhamnose inducible promoter drives the expression of a construct comprising one or more polypeptides of interest described herein jointly with a second promoter, e.g., a second constitutive or inducible promoter. In some embodiments, two promoters are positioned proximally to the construct and drive its expression, wherein the rhamnose inducible promoter drives expression under a first set of exogenous conditions, and the second promoter drives the expression under a second set of exogenous conditions. In second example, the rhamnose promoter drives the expression of one or more gene cassette(s) under a first inducing condition and another inducible promoter drives the expression of one or more of the same or different gene cassette(s) expressing one or more polypeptides of interest, under a second inducing condition. In both examples, the first and second conditions can be two sequential inducing culture conditions (i.e., during preparation of the culture in a flask, fermenter or other appropriate culture vessel, e.g., rhamnose and IPTG). In another non-limiting example, the first inducing conditions are culture conditions, e.g., the presence of rhamnose, and the second inducing conditions are in vivo conditions. Such in vivo conditions include low-oxygen, microaerobic, or anaerobic conditions, presence of gut metabolites, and/or nutritional and/or chemical inducers and/or metabolites administered in combination with the bacterial strain. In some embodiments, the one or more rhamnose promoters drive expression of one or more protein(s) of interest, in combination with the FNR promoter driving the expression of the same gene sequence(s).

[0377] In some embodiments, the gene sequence(s) encoding the branched chain amino acid catabolism enzyme(s) or other polypeptide(s) of interest, are present on a plasmid and operably linked to a promoter that is induced by rhamnose. In some embodiments, the gene sequence(s) encoding the branched chain amino acid catabolism enzyme(s) or branched chain amino acid transporter(s) and/or BCAA binding protein(s) and/or BCAA exporter(s) is present in the chromosome and operably linked to a promoter that is induced by rhamnose.

[0378] In some embodiments, the genetically engineered bacteria comprise one or more gene sequence(s) which are inducible through an Isopropyl β-D-1-thiogalactopyranoside (IPTG) inducible system or other compound which induced transcription from the Lac Promoter. IPTG is a molecular mimic of allolactose, a lactose metabolite that activates transcription of the lac operon. In contrast to allolactose, the sulfur atom in IPTG creates a non-hydrolyzable chemical blond, which prevents the degradation of IPTG, allowing the concentration to remain constant. IPTG binds to the lac repressor and releases the tetrameric repressor (lacI) from the lac operator in an allosteric manner, thereby allowing the transcription of genes in the lac operon. Since IPTG is not metabolized by E. coli, its concentration stays constant and the rate of expression of Lac promoter-controlled is tightly controlled, both in vivo and in vitro. IPTG intake is independent on the action of lactose permease, since other transport pathways are also involved. Inducible expression from the PLac can be controlled or fine-tuned through the optimization of the ribosome binding site (RBS), as described herein. Other compounds which inactivate LacI, can be used instead of IPTG in a similar manner.

[0379] In one embodiment, expression of the optimized enzyme(s), e.g., kivD, leuDH, adh2, and brnQ, e.g., as described herein, is driven directly or indirectly by one or more IPTG inducible promoter(s). In one embodiment, the genetically engineered bacteria encode one or more branched chain amino acid transporter(s), e.g., livKHMGF and/or brnQ, described herein, whose expression is driven directly or indirectly by one or more IPTG inducible promoter(s). In one embodiment, the genetically engineered bacteria encode one or more branched chain amino acid exporter(s) described herein, whose expression is driven directly or indirectly by one or more IPTG inducible promoter(s).

[0380] In some embodiments, the IPTG inducible promoter is useful for or induced during in vivo expression of the one or more protein(s) of interest. In some embodiments, expression of one or more branched chain amino acid catabolism enzyme(s) and/or branched chain amino acid transporter(s) is driven directly or indirectly by one or more IPTG inducible promoter(s) in vivo. In some embodiments, the promoter is directly or indirectly induced by a molecule (e.g., IPTG) that is co-administered with the genetically engineered bacteria of the invention.

[0381] In some embodiments, expression of one or more branched chain amino acid catabolism enzyme(s) and/or branched chain amino acid transporter(s) and/or BCAA binding protein(s) and/or BCAA exporter(s), is driven directly or indirectly by one or more IPTG inducible promoter(s) during in vitro growth, preparation, or manufacturing of the strain prior to in vivo administration. In some embodiments, the IPTG inducible promoter(s) are induced in culture, e.g., grown in a flask, fermenter or other appropriate culture vessel, e.g., used during cell growth, cell expansion, fermentation, recovery, purification, formulation, and/or manufacture. In some embodiments, the promoter is directly or indirectly induced by a molecule, e.g., IPTG, that is added to in the bacterial culture to induce expression and pre-load the bacterium with branched chain amino acid catabolism enzyme(s) prior to administration. In some embodiments, the cultures, which are induced by IPTG, are grown aerobically. In some embodiments, the cultures, which are induced by IPTG, are grown anaerobically.

[0382] In some embodiments, bacterial cell comprises two or more distinct branched chain amino acid catabolism cassette(s) or other polypeptide(s) of interest, one or more of which are induced by IPTG. In some embodiments, the genetically engineered bacteria comprise multiple copies of the same branched chain amino acid catabolism enzyme gene sequence(s) and/or transporter gene sequence(s), e.g., as described herein, which are induced IPTG. In some embodiments, the genetically engineered bacteria comprise multiple copies of different branched chain amino acid catabolism enzyme genes sequence(s) and/or transporter gene sequence(s) and/or other gene sequence(s) of interest, as described herein, one or more of which are induced by IPTG.

[0383] In a first example, the IPTG inducible promoter drives the expression of a construct comprising one or more polypeptides of interest described herein jointly with a second promoter, e.g., a second constitutive or inducible promoter. In some embodiments, two promoters are positioned proximally to the construct and drive its expression, wherein the IPTG inducible promoter drives expression under a first set of exogenous conditions, and the second promoter drives the expression under a second set of exogenous conditions. In second example, the IPTG promoter drives the expression of one or more gene cassette(s) under a first inducing condition and another inducible promoter drives the expression of one or more of the same or different gene cassette(s) expressing one or more polypeptides of interest, under a second inducing condition. In both examples, the first and second conditions can be two sequential inducing culture conditions (i.e., during preparation of the culture in a flask, fermenter or other appropriate culture vessel, e.g., IPTG and IPTG). In another non-limiting example, the first inducing conditions are culture conditions, e.g., the presence of IPTG, and the second inducing conditions are in vivo conditions. Such in vivo conditions include low-oxygen, microaerobic, or anaerobic conditions, presence of gut metabolites, and/or nutritional and/or chemical inducers and/or metabolites administered in combination with the bacterial strain. In some embodiments, the one or more IPTG promoters drive expression of one or more protein(s) of interest, in combination with the FNR promoter driving the expression of the same gene sequence(s).

[0384] In some embodiments, the gene sequence(s) encoding the branched chain amino acid catabolism enzyme(s) or other polypeptide(s) of interest, are present on a plasmid and operably linked to a promoter that is induced by IPTG. In some embodiments, the gene sequence(s) encoding the branched chain amino acid catabolism enzyme(s) or branched chain amino acid transporter(s) is present in the chromosome and operably linked to a promoter that is induced by IPTG.

[0385] In some embodiments, the IPTG inducible construct further comprises a gene encoding lacI, which is divergently transcribed from the same promoter as the one or more one or more branched chain amino acid catabolism enzyme(s) and/or transporters described herein.

[0386] In some embodiments, the genetically engineered bacteria comprise one or more gene sequence(s) which are inducible through a tetracycline inducible system. The initial system Gossen and Bujard (Gossen M & Bujard H. PNAS, 1992 Jun. 15; 89(12):5547-51) developed is known as tetracycline off: in the presence of tetracycline, expression from a tet-inducible promoter is reduced. Tetracycline-controlled transactivator (tTA) was created by fusing tetR with the C-terminal domain of VP16 (virion protein 16) from herpes simplex virus. In the absence of tetracycline, the tetR portion of tTA will bind tetO sequences in the tet promoter, and the activation domain promotes expression. In the presence of tetracycline, tetracycline binds to tetR, precluding tTA from binding to the tetO sequences. Next, a reverse Tet repressor (rTetR), was developed which created a reliance on the presence of tetracycline for induction, rather than repression. The new transactivator rtTA (reverse tetracycline-controlled transactivator) was created by fusing rTetR with VP16. The tetracycline on system is also known as the rtTA-dependent system.

[0387] In one embodiment, expression of the optimized enzyme(s), e.g., kivD, leuDH, adh2, and brnQ, e.g., as described herein, is driven directly or indirectly by one or more tetracycline inducible promoter(s). In one embodiment, the genetically engineered bacteria encode one or more branched chain amino acid transporter(s), e.g., livKHMGF and/or brnQ, described herein, whose expression is driven directly or indirectly by one or more tetracycline inducible promoter(s).

[0388] In one embodiment, the genetically engineered bacteria encode one or more branched chain amino acid exporter(s).

[0389] In some embodiments, the tetracycline inducible promoter is useful for or induced during in vivo expression of the one or more protein(s) of interest. In some embodiments, expression of one or more branched chain amino acid catabolism enzyme(s) and/or branched chain amino acid transporter(s) and or other polypeptide(s) of interest is driven directly or indirectly by one or more tetracycline inducible promoter(s) in vivo. In some embodiments, the promoter is directly or indirectly induced by a molecule (e.g., tetracycline) that is co-administered with the genetically engineered bacteria of the invention.

[0390] In some embodiments, expression of one or more branched chain amino acid catabolism enzyme(s) and/or branched chain amino acid transporter(s) and or other polypeptide(s) of interest, is driven directly or indirectly by one or more tetracycline inducible promoter(s) during in vitro growth, preparation, or manufacturing of the strain prior to in vivo administration. In some embodiments, the tetracycline inducible promoter(s) are induced in culture, e.g., grown in a flask, fermenter or other appropriate culture vessel, e.g., used during cell growth, cell expansion, fermentation, recovery, purification, formulation, and/or manufacture. In some embodiments, the promoter is directly or indirectly induced by a molecule, e.g., tetracycline, that is added to in the bacterial culture to induce expression and pre-load the bacterium with branched chain amino acid catabolism enzyme(s) prior to administration. In some embodiments, the cultures, which are induced by tetracycline, are grown aerobically. In some embodiments, the cultures, which are induced by tetracycline, are grown anaerobically.

[0391] In some embodiments, bacterial cell comprises two or more distinct branched chain amino acid catabolism cassette(s) and/or other polypeptide(s) of interest, one or more of which are induced by tetracycline. In some embodiments, the genetically engineered bacteria comprise multiple copies of the same branched chain amino acid catabolism enzyme gene sequence(s) and/or transporter gene sequence(s) and/or gene sequence(s) for the expression of other polypeptide(s) of interest, e.g., as described herein, which are induced by tetracycline. In some embodiments, the genetically engineered bacteria comprise multiple copies of different branched chain amino acid catabolism enzyme genes sequence(s) and/or transporter gene sequence(s) and gene sequence(s) for the expression of other polypeptide(s) of interest, e.g., as described herein, one or more of which are induced by tetracycline.

[0392] In a first example, the tetracycline inducible promoter drives the expression of a construct comprising one or more polypeptides of interest described herein jointly with a second promoter, e.g., a second constitutive or inducible promoter. In some embodiments, two promoters are positioned proximally to the construct and drive its expression, wherein the tetracycline inducible promoter drives expression under a first set of exogenous conditions, and the second promoter drives the expression under a second set of exogenous conditions. In second example, the tetracycline promoter drives the expression of one or more gene cassette(s) under a first inducing condition and another inducible promoter drives the expression of one or more of the same or different gene cassette(s) expressing one or more polypeptides of interest, under a second inducing condition. In both examples, the first and second conditions can be two sequential inducing culture conditions (i.e., during preparation of the culture in a flask, fermenter or other appropriate culture vessel, e.g., tetracycline and IPTG). In another non-limiting example, the first inducing conditions are culture conditions, e.g., the presence of tetracycline, and the second inducing conditions are in vivo conditions. Such in vivo conditions include low-oxygen, microaerobic, or anaerobic conditions, presence of gut metabolites, and/or nutritional and/or chemical inducers and/or metabolites administered in combination with the bacterial strain. In some embodiments, the one or more tetracycline promoters drive expression of one or more protein(s) of interest, in combination with the FNR promoter driving the expression of the same gene sequence(s).

[0393] In some embodiments, the gene sequence(s) encoding the branched chain amino acid catabolism enzyme(s) or other polypeptide(s) of interest, are present on a plasmid and operably linked to a promoter that is induced by tetracycline. In some embodiments, the gene sequence(s) encoding the branched chain amino acid catabolism enzyme(s) or branched chain amino acid transporter(s) is present in the chromosome and operably linked to a promoter that is induced by tetracycline.

[0394] In some embodiments, the tetracycline inducible construct further comprises a gene encoding AraC, which is divergently transcribed from the same promoter as the one or more one or more branched chain amino acid catabolism enzyme(s) and/or transporters described herein.

[0395] In some embodiments, the genetically engineered bacteria comprise one or more gene sequence(s) whose expression is controlled by a temperature sensitive mechanism. Thermoregulators are advantageous because of strong transcriptional control without the use of external chemicals or specialized media (see, e.g., Nemani et al., Magnetic nanoparticle hyperthermia induced cytosine deaminase expression in microencapsulated E. coli for enzyme-prodrug therapy; J Biotechnol. 2015 Jun. 10; 203: 32-40, and references therein). Thermoregulated protein expression using the mutant cI857 repressor and the pL and/or pR phage λ promoters have been used to engineer recombinant bacterial strains. The gene of interest cloned downstream of the a promoters can then be efficiently regulated by the mutant thermolabile cI857 repressor of bacteriophage λ. At temperatures below 37° C., cI857 binds to the oL or regions of the pR promoter and blocks transcription by RNA polymerase. At higher temperatures, the functional cI857 dimer is destabilized, binding to the oL or oR DNA sequences is abrogated, and mRNA transcription is initiated. Inducible expression from the thermoregulated promoter can be controlled or further fine-tuned through the optimization of the ribosome binding site (RBS), as described herein.

[0396] In one embodiment, expression of one or more protein(s) of interest is driven directly or indirectly by one or more thermoregulated promoter(s). In one embodiment, expression of the optimized enzyme(s), e.g., kivD, leuDH, adh2, and brnQ, e.g., as described herein, is driven directly or indirectly by one or more thermoregulated inducible promoter(s). In one embodiment, the genetically engineered bacteria encode one or more branched chain amino acid transporter(s), e.g., livKHMGF and/or brnQ, described herein, whose expression is driven directly or indirectly by one or more thermoregulated inducible promoter(s). In one embodiment, the genetically engineered bacteria encode one or more branched chain amino acid exporter(s) described herein, whose expression is driven directly or indirectly by one or more thermoregulated inducible promoter(s).

[0397] In some embodiments, the thermoregulated promoter is useful for or induced during in vivo expression of the one or more protein(s) of interest. In some embodiments, expression of one or more branched chain amino acid catabolism enzyme(s) and/or branched chain amino acid transporter(s) and/or other protein(s) of interest is driven directly or indirectly by one or more thermoregulated promoter(s) in vivo.

[0398] In some embodiments, expression of one or more protein(s) of interest is driven directly or indirectly by one or more thermoregulated promoter(s) during in vitro growth, preparation, or manufacturing of the strain prior to in vivo administration. In some embodiments, it may be advantageous to shut off production of the one or more branched chain amino acid catabolism enzyme(s) and/or branched chain amino acid transporter(s). This can be done in a thermoregulated system by growing the strain at lower temperatures, e.g., 30° C. Expression can then be induced by elevating the temperature to 37° C. and/or 42° C. In some embodiments, the thermoregulated promoter(s) are induced in culture, e.g., grown in a flask, fermenter or other appropriate culture vessel, e.g., used during cell growth, cell expansion, fermentation, recovery, purification, formulation, and/or manufacture. In some embodiments, the cultures, which are induced by temperatures between 37° C. and 42° C., are grown aerobically. In some embodiments, the cultures, which are induced by induced by temperatures between 37° C. and 42° C., are grown anaerobically.

[0399] In some embodiments, bacterial cell comprises two or more distinct branched chain amino acid catabolism cassette(s) or branched chain amino acid transporter(s) and/or cassette(s) for the expression of other protein(s) of interest, one or more of which are induced by temperature. In some embodiments, the genetically engineered bacteria comprise multiple copies of the same branched chain amino acid catabolism enzyme gene sequence(s) and/or transporter gene sequence(s) and/or gene sequence(s) for the expression of other proteins of interest, e.g., as described herein, which are induced by temperature. In some embodiments, the genetically engineered bacteria comprise multiple copies of different branched chain amino acid catabolism enzyme genes sequence(s) and/or transporter gene sequence(s) or other gene sequence(s) of interest, e.g., as described herein, one or more of which are induced by temperature.

[0400] In a first example, the temperature inducible promoter drives the expression of a construct comprising one or more polypeptides of interest described herein jointly with a second promoter, e.g., a second constitutive or inducible promoter. In some embodiments, two promoters are positioned proximally to the construct and drive its expression, wherein the temperature inducible promoter drives expression under a first set of exogenous conditions, and the second promoter drives the expression under a second set of exogenous conditions. In second example, the temperature promoter drives the expression of one or more gene cassette(s) under a first inducing condition and another inducible promoter drives the expression of one or more of the same or different gene cassette(s) expressing one or more polypeptides of interest, under a second inducing condition. In both examples, the first and second conditions can be two sequential inducing culture conditions (i.e., during preparation of the culture in a flask, fermenter or other appropriate culture vessel, e.g., temperature regulation and IPTG). In another non-limiting example, the first inducing conditions are culture conditions, e.g., the permissive temperature, and the second inducing conditions are in vivo conditions. Such in vivo conditions include low-oxygen, microaerobic, or anaerobic conditions, presence of gut metabolites, and/or nutritional and/or chemical inducers and/or metabolites administered in combination with the bacterial strain. In some embodiments, the one or more temperature regulated promoters drive expression of one or more protein(s) of interest, in combination with the FNR promoter driving the expression of the same gene sequence(s).

[0401] In some embodiments, the gene sequence(s) encoding the branched chain amino acid catabolism enzyme(s) or other polypeptide(s) of interest, are present on a plasmid and operably linked to a promoter that is induced by temperature. In some embodiments, the gene sequence(s) encoding the branched chain amino acid catabolism enzyme(s) or branched chain amino acid transporter(s) is present in the chromosome and operably linked to a promoter that is induced by temperature.

[0402] In some embodiments, the thermoregulated construct further comprises a gene encoding mutant cI857 repressor, which is divergently transcribed from the same promoter as the one or more one or more branched chain amino acid catabolism enzyme(s) and/or transporters described herein. In some embodiments, the genetically engineered bacteria comprise one or more gene sequence(s) which are indirectly inducible through a system driven by the PssB promoter. The Pssb promoter is active under aerobic conditions, and shuts off under anaerobic conditions.

[0403] This promoter can be used to express a gene of interest under aerobic conditions. This promoter can also be used to tightly control the expression of a gene product such that it is only expressed under anaerobic conditions. In this case, the oxygen induced PssB promoter induces the expression of a repressor, which represses the expression of a gene of interest. As a result, the gene of interest is only expressed in the absence of the repressor, i.e., under anaerobic conditions. This strategy has the advantage of an additional level of control for improved fine-tuning and tighter control.

[0404] In one embodiment, expression of the optimized enzyme(s), e.g., kivD, leuDH, adh2, and brnQ, e.g., as described herein, is driven directly or indirectly by one or more PssB promoter(s). In one embodiment, the genetically engineered bacteria encode one or more branched chain amino acid transporter(s), e.g., livKHMGF and/or brnQ, described herein, whose expression is driven directly or indirectly by one or more PssB promoter(s). In one embodiment, the genetically engineered bacteria encode one or more branched chain amino acid exporter(s), described herein, whose expression is driven directly or indirectly by one or more PssB promoter(s).

[0405] In some embodiments, the PssB promoter is useful for or induced during in vivo expression of the one or more protein(s) of interest. In some embodiments, expression of one or more branched chain amino acid catabolism enzyme(s) and/or branched chain amino acid transporter(s) and/or other protein(s) of interest is driven directly or indirectly by one or more PssB promoter(s) in vivo. In some embodiments, the promoter is directly or indirectly induced by a molecule (e.g., arabinose) that is co-administered with the genetically engineered bacteria of the invention.

[0406] In some embodiments, expression of one or more branched chain amino acid catabolism enzyme(s) and/or branched chain amino acid transporter(s) and/or other protein(s) of interest, is driven directly or indirectly by one or more PssB promoter(s) during in vitro growth, preparation, or manufacturing of the strain prior to in vivo administration. In some embodiments, the PssB promoter(s) are induced in culture, e.g., grown in a flask, fermenter or other appropriate culture vessel, e.g., used during cell growth, cell expansion, fermentation, recovery, purification, formulation, and/or manufacture. In some embodiments, the promoter is directly or indirectly induced by a molecule, e.g., arabinose, that is added to in the bacterial culture to induce expression and pre-load the bacterium with branched chain amino acid catabolism enzyme(s) prior to administration. In some embodiments, the cultures, which are induced by arabinose, are grown aerobically. In some embodiments, the cultures, which are induced by arabinose, are grown anaerobically.

[0407] In some embodiments, bacterial cell comprises two or more distinct branched chain amino acid catabolism cassette(s) or other polypeptide(s) of interest, one or more of which are induced by arabinose. In some embodiments, the genetically engineered bacteria comprise multiple copies of the same branched chain amino acid catabolism enzyme gene sequence(s) and/or transporter gene sequence(s) and/or other gene sequence(s) of interest, e.g., as described herein, which are induced by one or more nutritional and/or chemical inducer(s) and/or metabolite(s). In some embodiments, the genetically engineered bacteria comprise multiple copies of different branched chain amino acid catabolism enzyme genes sequence(s) and/or transporter gene sequence(s), e.g., as described herein, one or more of which are induced by one or more nutritional and/or chemical inducer(s) and/or metabolite(s).

[0408] In a first example, the PssB promoter drives the expression of a construct comprising one or more polypeptides of interest described herein jointly with a second promoter, e.g., a second constitutive or inducible promoter. In some embodiments, two promoters are positioned proximally to the construct and drive its expression, wherein the PssB promoter drives expression under a first set of exogenous conditions, and the second promoter drives the expression under a second set of exogenous conditions. In second example, the PssB promoter drives the expression of one or more gene cassette(s) under a first inducing condition and another inducible promoter drives the expression of one or more of the same or different gene cassette(s) expressing one or more polypeptides of interest, under a second inducing condition. In both examples, the first and second conditions can be two sequential inducing culture conditions (i.e., during preparation of the culture in a flask, fermenter or other appropriate culture vessel, e.g., PssB and IPTG). In another non-limiting example, the first inducing conditions are culture conditions, e.g., the presence of arabinose, and the second inducing conditions are in vivo conditions. Such in vivo conditions include low-oxygen, microaerobic, or anaerobic conditions, presence of gut metabolites, and/or nutritional and/or chemical inducers and/or metabolites administered in combination with the bacterial strain. In some embodiments, the one or more PssB promoters drive expression of one or more protein(s) of interest, in combination with the FNR promoter driving the expression of the same gene sequence(s).

[0409] In some embodiments, the gene sequence(s) encoding the branched chain amino acid catabolism enzyme(s) or other polypeptide(s) of interest, are present on a plasmid and operably linked to a promoter that is induced by arabinose. In some embodiments, the gene sequence(s) encoding the branched chain amino acid catabolism enzyme(s) or branched chain amino acid transporter(s) is present in the chromosome and operably linked to a promoter that is induced by arabinose.

[0410] In another non-limiting example, this strategy can be used to control expression of thyA and/or dapA, e.g., to make a conditional auxotroph. The chromosomal copy of dapA or ThyA is knocked out. Under anaerobic conditions, dapA or thyA—as the case may be—are expressed, and the strain can grow in the absence of dap or thymidine. Under aerobic conditions, dapA or thyA expression is shut off, and the strain cannot grow in the absence of dap or thymidine. Such a strategy can, for example be employed to allow survival of bacteria under anaerobic conditions, e.g., the gut, but prevent survival under aerobic conditions (biosafety switch).

[0411] Essential Genes and Auxotrophs

[0412] As used herein, the term “essential gene” refers to a gene which is necessary to for cell growth and/or survival. Bacterial essential genes are well known to one of ordinary skill in the art, and can be identified by directed deletion of genes and/or random mutagenesis and screening (see, for example, Zhang and Lin, 2009, DEG 5.0, a database of essential genes in both prokaryotes and eukaryotes, Nucl. Acids Res., 37:D455-D458 and Gerdes et al., Essential genes on metabolic maps, Curr. Opin. Biotechnol., 17(5):448-456, the entire contents of each of which are expressly incorporated herein by reference).

[0413] An “essential gene” may be dependent on the circumstances and environment in which an organism lives. For example, a mutation of, modification of, or excision of an essential gene may result in the recombinant bacteria of the disclosure becoming an auxotroph. An auxotrophic modification is intended to cause bacteria to die in the absence of an exogenously added nutrient essential for survival or growth because they lack the gene(s) necessary to produce that essential nutrient.

[0414] An auxotrophic modification is intended to cause bacteria to die in the absence of an exogenously added nutrient essential for survival or growth because they lack the gene(s) necessary to produce that essential nutrient. In some embodiments, any of the genetically engineered bacteria described herein also comprise a deletion or mutation in one or more gene(s) required for cell survival and/or growth.

[0415] In some embodiments, the bacterial cell comprises a genetic mutation in one or more endogenous gene(s) encoding a branched chain amino acid biosynthesis gene, wherein the genetic mutation reduces biosynthesis of one or more branched chain amino acids in the bacterial cell. In some embodiments, the endogenous gene encoding a branched chain amino acid biosynthesis gene is a keto acid reductoisomerase gene. Keto acid reductoisomerase gene is required for branched chain amino acid synthesis. Knock-out of this gene creates an auxotroph and requires the cell to import leucine to survive. In some embodiments, the bacterial cell comprises a genetic mutation in ilvC gene.

[0416] In one embodiment, the essential gene is an oligonucleotide synthesis gene, for example, thyA. In another embodiment, the essential gene is a cell wall synthesis gene, for example, dapA. In yet another embodiment, the essential gene is an amino acid gene, for example, serA or MetA. Any gene required for cell survival and/or growth may be targeted, including but not limited to, cysE, glnA, ilvD, leuB, lysA, serA, metA, glyA, hisB, ilvA, pheA, proA, thrC, trpC, tyrA, thyA, uraA, dapA, dapB, dapD, dapE, dapF, flhD, metB, metC, proAB, and thi1, as long as the corresponding wild-type gene product is not produced in the bacteria.

[0417] Table 6 lists depicts exemplary bacterial genes which may be disrupted or deleted to produce an auxotrophic strain. These include, but are not limited to, genes required for oligonucleotide synthesis, amino acid synthesis, and cell wall synthesis.

TABLE 6
Non-limiting Examples of Bacterial Genes
Useful for Generation of an Auxotroph

| Amino Acid | Oligonucleotide | Cell Wall |
|---|---|---|
| cysE | thyA | dapA |
| glnA | uraA | dapB |
| ilvD | | dapD |
| leuB | | dapE |
| lysA | | dapF |
| serA | | |
| metA | | |
| glyA | | |
| hisB | | |
| ilvA | | |
| pheA | | |
| proA | | |
| thrC | | |
| trpC | | |
| tyrA | | |

[0418] Table 7 shows the survival of various amino acid auxotrophs in the mouse gut, as detected 24 hrs and 48 hrs post-gavage. These auxotrophs were generated using BW25113, a non-Nissle strain of E. coli.

TABLE 7
Survival of amino acid auxotrophs in the mouse gut

| Gene | AA Auxotroph | Pre-Gavage | 24 hours | 48 hours |
|---|---|---|---|---|
| argA | Arginine | Present | Present | Absent |
| cysE | Cysteine | Present | Present | Absent |
| glnA | Glutamine | Present | Present | Absent |
| glyA | Glycine | Present | Present | Absent |
| hisB | Histidine | Present | Present | Present |
| ilvA | Isoleucine | Present | Present | Absent |
| leuB | Leucine | Present | Present | Absent |
| lysA | Lysine | Present | Present | Absent |
| metA | Methionine | Present | Present | Present |
| pheA | Phenylalanine | Present | Present | Present |
| proA | Proline | Present | Present | Absent |
| serA | Serine | Present | Present | Present |
| thrC | Threonine | Present | Present | Present |
| trpC | Tryptophan | Present | Present | Present |
| tyrA | Tyrosine | Present | Present | Present |
| ilvD | Valine/Isoleucine/ | Present | Present | Absent |
| | Leucine | | | |
| thyA | Thiamine | Present | Absent | Absent |
| uraA | Uracil | Present | Absent | Absent |
| flhD | FlhD | Present | Present | Present |

[0419] For example, thymine is a nucleic acid that is required for bacterial cell growth; in its absence, bacteria undergo cell death. The thyA gene encodes thimidylate synthetase, an enzyme that catalyzes the first step in thymine synthesis by converting dUMP to dTMP (Sat et al., 2003). In some embodiments, the bacterial cell of the disclosure is a thyA auxotroph in which the thyA gene is deleted and/or replaced with an unrelated gene. A thyA auxotroph can grow only when sufficient amounts of thymine are present, e.g., by adding thymine to growth media in vitro, or in the presence of high thymine levels found naturally in the human gut in vivo. In some embodiments, the bacterial cell of the disclosure is auxotrophic in a gene that is complemented when the bacterium is present in the mammalian gut. Without sufficient amounts of thymine, the thyA auxotroph dies. In some embodiments, the auxotrophic modification is used to ensure that the bacterial cell does not survive in the absence of the auxotrophic gene product (e.g., outside of the gut).

[0420] Diaminopimelic acid (DAP) is an amino acid synthetized within the lysine biosynthetic pathway and is required for bacterial cell wall growth (Meadow et al., 1959; Clarkson et al., 1971). In some embodiments, any of the genetically engineered bacteria described herein is a dapD auxotroph in which dapD is deleted and/or replaced with an unrelated gene. A dapD auxotroph can grow only when sufficient amounts of DAP are present, e.g., by adding DAP to growth media in vitro. Without sufficient amounts of DAP, the dapD auxotroph dies. In some embodiments, the auxotrophic modification is used to ensure that the bacterial cell does not survive in the absence of the auxotrophic gene product (e.g., outside of the gut).

[0421] In other embodiments, the genetically engineered bacterium of the present disclosure is a uraA auxotroph in which uraA is deleted and/or replaced with an unrelated gene. The uraA gene codes for UraA, a membrane-bound transporter that facilitates the uptake and subsequent metabolism of the pyrimidine uracil (Andersen et al., 1995). A uraA auxotroph can grow only when sufficient amounts of uracil are present, e.g., by adding uracil to growth media in vitro. Without sufficient amounts of uracil, the uraA auxotroph dies. In some embodiments, auxotrophic modifications are used to ensure that the bacteria do not survive in the absence of the auxotrophic gene product (e.g., outside of the gut).

[0422] In complex communities, it is possible for bacteria to share DNA. In very rare circumstances, an auxotrophic bacterial strain may receive DNA from a non-auxotrophic strain, which repairs the genomic deletion and permanently rescues the auxotroph. Therefore, engineering a bacterial strain with more than one auxotroph may greatly decrease the probability that DNA transfer will occur enough times to rescue the auxotrophy. In some embodiments, the genetically engineered bacteria comprise a deletion or mutation in two or more genes required for cell survival and/or growth.

[0423] Other examples of essential genes include, but are not limited to yhbV, yagG, hemB, secD, secF, ribD, ribE, thiL, dxs, ispA, dnaX adk, hemH, lpxH, cysS, fold, rplT, infC, thrS, nadE, gapA, yeaZ, aspS, argS, pgsA, yejM, metG, folE, yejM, gyrA, nrdA, nrdB, folC, accD, fabB, gltX ligA, zipA, dapE, dapA, der, hisS, ispG, suhB, tadA, acpS, era, rnc, ftsB, eno, pyrG, chpR, lgt, jbaA, pgk, yqgD, metK, yqgF, plsC, ygiT, pare, ribB, cca, ygjD, tdcF, yraL, yihA, ftsN, murI, murB, birA, secE, nusG, rplJ, rplL, rpoB, rpoC, ubiA, plsB, lexA, dnaB, ssb, alsK, groS, psd, orn, yjeE, rpsR, chpS, ppa, valS, yjgP, yjgQ, dnaC, ribF, lspA, ispH, dapB, folA, imp, yabQ, ftsL, ftsI, murE, murF, mraY, murD, ftsW, murG, murC, ftsQ, ftsA, ftsZ, lpxC, secM, secA, can, folK, hemL, yadR, dapD, map, rpsB, infB, nusA, ftsH, obgE, rpmA, rplU, ispB, murA, yrbB, yrbK, yhbN, rpsl, rplM, degS, mreD, mreC, mreB, accB, accC, yrdC, def fmt, rplQ, rpoA, rpsD, rpsK, rpsM, entD, mrdB, mrdA, nadD, hlepB, rpoE, pssA, yfiO, rplS, trmD, rpsP, fjh, grpE, yfjB, csrA, ispF, ispD, rplW, rplD, rplC, rpsJ, fusA, rpsG, rpsL, trpS, yrfF, asd, rpoH, ftsX, ftsE, ftsY, frr, dxr, ispU, rfaK, kdtA, coaD, rpmB, dfp, dut, gmk, spot, gyrB, dnaN, dnaA, rpmH, rnpA, yidC, tnaB, glmS, glmU, wzyE, hemD, hemC, yigP, ubiB, ubiD, hemG, secY, rplO, rpmD, rpsE, rplR, rplF, rpsH, rpsN, rplE, rplX rplN, rpsQ, rpmC, rplP, rpsC, rplV, rpsS, rplB, cdsA, yaeL, yaeT, lpxD, fabZ, lpxA, lpxB, dnaE, accA, tilS, proS, yafF, tsf, pyrH, olA, rlpB, leuS, lnt, glnS, fldA, cydA, infA, cydC, ftsK, lolA, serS, rpsA, msbA, lpxK, kdsB, mukF, mukE, mukB, asnS, fabA, mviN, rne, yceQ, fabD, fabG, acpP, tmk, holB, lolC, lolD, lolE, purB, ymfK, minE, mind, pth, rsA, ispE, lolB, hemA, prfA, prmC, kdsA, topA, ribA, fabI, racR, dicA, ydfB, tyrS, ribC, ydiL, pheT, pheS, yhhQ, bcsB, glyQ, yibJ, and gpsA. Other essential genes are known to those of ordinary skill in the art.

[0424] In some embodiments, the genetically engineered bacterium of the present disclosure is a synthetic ligand-dependent essential gene (SLiDE) bacterial cell. SLiDE bacterial cells are synthetic auxotrophs with a mutation in one or more essential genes that only grow in the presence of a particular ligand (see Lopez and Anderson “Synthetic Auxotrophs with Ligand-Dependent Essential Genes for a BL21 (DE3 Biosafety Strain,” ACS Synthetic Biology (2015) DOI: 10.1021/acssynbio.5b00085, the entire contents of which are expressly incorporated herein by reference).

[0425] In some embodiments, the SLiDE bacterial cell comprises a mutation in an essential gene. In some embodiments, the essential gene is selected from the group consisting of pheS, dnaN, tyrS, metG and adk. In some embodiments, the essential gene is dnaN comprising one or more of the following mutations: H191N, R240C, I317S, F319V, L340T, V347I, and S345C. In some embodiments, the essential gene is dnaN comprising the mutations H191N, R240C, I317S, F319V, L340T, V347I, and S345C. In some embodiments, the essential gene is pheS comprising one or more of the following mutations: F125G, P183T, P184A, R186A, and I188L. In some embodiments, the essential gene is pheS comprising the mutations F125G, P183T, P184A, R186A, and I188L. In some embodiments, the essential gene is tyrS comprising one or more of the following mutations: L36V, C38A and F40G. In some embodiments, the essential gene is tyrS comprising the mutations L36V, C38A and F40G. In some embodiments, the essential gene is metG comprising one or more of the following mutations: E45Q, N47R, I49G, and A51C. In some embodiments, the essential gene is metG comprising the mutations E45Q, N47R, I49G, and A51C. In some embodiments, the essential gene is adk comprising one or more of the following mutations: I4L, L5I and L6G. In some embodiments, the essential gene is adk comprising the mutations I4L, L5I and L6G.

[0426] In some embodiments, the genetically engineered bacterium is complemented by a ligand. In some embodiments, the ligand is selected from the group consisting of benzothiazole, indole, 2-aminobenzothiazole, indole-3-butyric acid, indole-3-acetic acid, and L-histidine methyl ester. For example, bacterial cells comprising mutations in metG (E45Q, N47R, I49G, and A51C) are complemented by benzothiazole, indole, 2-aminobenzothiazole, indole-3-butyric acid, indole-3-acetic acid or L-histidine methyl ester. Bacterial cells comprising mutations in dnaN (H191N, R240C, I317S, F319V, L340T, V347I, and S345C) are complemented by benzothiazole, indole or 2-aminobenzothiazole. Bacterial cells comprising mutations in pheS (F125G, P183T, P184A, R186A, and I188L) are complemented by benzothiazole or 2-aminobenzothiazole. Bacterial cells comprising mutations in tyrS (L36V, C38A, and F40G) are complemented by benzothiazole or 2-aminobenzothiazole. Bacterial cells comprising mutations in adk (I4L, L5I and L6G) are complemented by benzothiazole or indole.

[0427] In some embodiments, the genetically engineered bacterium comprises more than one mutant essential gene that renders it auxotrophic to a ligand. In some embodiments, the bacterial cell comprises mutations in two essential genes. For example, in some embodiments, the bacterial cell comprises mutations in tyrS (L36V, C38A, and F40G) and metG (E45Q, N47R, 149G, and A51C). In other embodiments, the bacterial cell comprises mutations in three essential genes. For example, in some embodiments, the bacterial cell comprises mutations in tyrS (L36V, C38A, and F40G), metG (E45Q, N47R, 149G, and A51C), and pheS (F125G, P183T, P184A, R186A, and I188L).

[0428] In some embodiments, the genetically engineered bacterium is a conditional auxotroph whose essential gene(s) is replaced using the arabinose system described herein.

[0429] Genetic Regulatory Circuits

[0430] In some embodiments, the genetically engineered bacteria comprise multi-layered genetic regulatory circuits for expressing the constructs described herein (see, e.g., U.S. Provisional Application No. 62/184,811, incorporated herein by reference in its entirety). The genetic regulatory circuits are useful to screen for mutant bacteria that produce a branched chain amino acid catabolism enzyme, BCAA transporter, and/or BCAA binding protein or rescue an auxotroph. In certain embodiments, the invention provides methods for selecting genetically engineered bacteria that produce one or more genes of interest.

[0431] In some embodiments, the invention provides genetically engineered bacteria comprising a gene or gene cassette for producing a payload and a T7 polymerase-regulated genetic regulatory circuit. For example, the genetically engineered bacteria comprise a first gene encoding a T7 polymerase, wherein the first gene is operably linked to a fumarate and nitrate reductase regulator (FNR)-responsive promoter; a second gene or gene cassette for producing a payload, wherein the second gene or gene cassette is operably linked to a T7 promoter that is induced by the T7 polymerase; and a third gene encoding an inhibitory factor, lysY, that is capable of inhibiting the T7 polymerase. In the presence of oxygen, FNR does not bind the FNR-responsive promoter, and the payload is not expressed. LysY is expressed constitutively (β-lac constitutive) and further inhibits T7 polymerase. In the absence of oxygen, FNR dimerizes and binds to the FNR-responsive promoter, T7 polymerase is expressed at a level sufficient to overcome lysY inhibition, and the payload is expressed. In some embodiments, the lysY gene is operably linked to an additional FNR binding site. In the absence of oxygen, FNR dimerizes to activate T7 polymerase expression as described above, and also inhibits lysY expression.

[0432] In some embodiments, the invention provides genetically engineered bacteria comprising a gene or gene cassette for producing a payload and a protease-regulated genetic regulatory circuit. For example, the genetically engineered bacteria comprise a first gene encoding an mf-lon protease, wherein the first gene is operably linked to a FNR-responsive promoter; a second gene or gene cassette for producing a payload operably linked to a tet regulatory region (tetO); and a third gene encoding an mf-lon degradation signal linked to a tet repressor (tetR), wherein the tetR is capable of binding to the tet regulatory region and repressing expression of the second gene or gene cassette. The mf-lon protease is capable of recognizing the mf-lon degradation signal and degrading the tetR. In the presence of oxygen, FNR does not bind the FNR-responsive promoter, the repressor is not degraded, and the payload is not expressed. In the absence of oxygen, FNR dimerizes and binds the FNR-responsive promoter, thereby inducing expression of mf-lon protease. The mf-lon protease recognizes the mf-lon degradation signal and degrades the tetR, and the payload is expressed.

[0433] In some embodiments, the invention provides genetically engineered bacteria comprising a gene or gene cassette for producing a payload and a repressor-regulated genetic regulatory circuit. For example, the genetically engineered bacteria comprise a first gene encoding a first repressor, wherein the first gene is operably linked to a FNR-responsive promoter; a second gene or gene cassette for producing a payload operably linked to a first regulatory region comprising a constitutive promoter; and a third gene encoding a second repressor, wherein the second repressor is capable of binding to the first regulatory region and repressing expression of the second gene or gene cassette. The third gene is operably linked to a second regulatory region comprising a constitutive promoter, wherein the first repressor is capable of binding to the second regulatory region and inhibiting expression of the second repressor. In the presence of oxygen, FNR does not bind the FNR-responsive promoter, the first repressor is not expressed, the second repressor is expressed, and the payload is not expressed. In the absence of oxygen, FNR dimerizes and binds the FNR-responsive promoter, the first repressor is expressed, the second repressor is not expressed, and the payload is expressed.

[0434] Examples of repressors useful in these embodiments include, but are not limited to, ArgR, TetR, ArsR, AscG, LacI, CscR, DeoR, DgoR, FruR, GalR, GatR, CI, LexA, RafR, QacR, and PtxS (US20030166191).

[0435] In some embodiments, the invention provides genetically engineered bacteria comprising a gene or gene cassette for producing a payload and a regulatory RNA-regulated genetic regulatory circuit. For example, the genetically engineered bacteria comprise a first gene encoding a regulatory RNA, wherein the first gene is operably linked to a FNR-responsive promoter, and a second gene or gene cassette for producing a payload. The second gene or gene cassette is operably linked to a constitutive promoter and further linked to a nucleotide sequence capable of producing an mRNA hairpin that inhibits translation of the payload. The regulatory RNA is capable of eliminating the mRNA hairpin and inducing payload translation via the ribosomal binding site. In the presence of oxygen, FNR does not bind the FNR-responsive promoter, the regulatory RNA is not expressed, and the mRNA hairpin prevents the payload from being translated. In the absence of oxygen, FNR dimerizes and binds the FNR-responsive promoter, the regulatory RNA is expressed, the mRNA hairpin is eliminated, and the payload is expressed.

[0436] In some embodiments, the invention provides genetically engineered bacteria comprising a gene or gene cassette for producing a payload and a CRISPR-regulated genetic regulatory circuit. For example, the genetically engineered bacteria comprise a Cas9 protein; a first gene encoding a CRISPR guide RNA, wherein the first gene is operably linked to a FNR-responsive promoter; a second gene or gene cassette for producing a payload, wherein the second gene or gene cassette is operably linked to a regulatory region comprising a constitutive promoter; and a third gene encoding a repressor operably linked to a constitutive promoter, wherein the repressor is capable of binding to the regulatory region and repressing expression of the second gene or gene cassette. The third gene is further linked to a CRISPR target sequence that is capable of binding to the CRISPR guide RNA, wherein said binding to the CRISPR guide RNA induces cleavage by the Cas9 protein and inhibits expression of the repressor. In the presence of oxygen, FNR does not bind the FNR-responsive promoter, the guide RNA is not expressed, the repressor is expressed, and the payload is not expressed. In the absence of oxygen, FNR dimerizes and binds the FNR-responsive promoter, the guide RNA is expressed, the repressor is not expressed, and the payload is expressed.

[0437] In some embodiments, the invention provides genetically engineered bacteria comprising a gene or gene cassette for producing a payload and a recombinase-regulated genetic regulatory circuit. For example, the genetically engineered bacteria comprise a first gene encoding a recombinase, wherein the first gene is operably linked to a FNR-responsive promoter, and a second gene or gene cassette for producing a payload operably linked to a constitutive promoter. The second gene or gene cassette is inverted in orientation (3′ to 5′) and flanked by recombinase binding sites, and the recombinase is capable of binding to the recombinase binding sites to induce expression of the second gene or gene cassette by reverting its orientation (5′ to 3′). In the presence of oxygen, FNR does not bind the FNR-responsive promoter, the recombinase is not expressed, the payload remains in the 3′ to 5′ orientation, and no functional payload is produced. In the absence of oxygen, FNR dimerizes and binds the FNR-responsive promoter, the recombinase is expressed, the payload is reverted to the 5′ to 3′ orientation, and functional payload is produced.

[0438] In some embodiments, the invention provides genetically engineered bacteria comprising a gene or gene cassette for producing a payload and a polymerase- and recombinase-regulated genetic regulatory circuit. For example, the genetically engineered bacteria comprise a first gene encoding a recombinase, wherein the first gene is operably linked to a FNR-responsive promoter; a second gene or gene cassette for producing a payload operably linked to a T7 promoter; a third gene encoding a T7 polymerase, wherein the T7 polymerase is capable of binding to the T7 promoter and inducing expression of the payload. The third gene encoding the T7 polymerase is inverted in orientation (3′ to 5′) and flanked by recombinase binding sites, and the recombinase is capable of binding to the recombinase binding sites to induce expression of the T7 polymerase gene by reverting its orientation (5′ to 3′). In the presence of oxygen, FNR does not bind the FNR-responsive promoter, the recombinase is not expressed, the T7 polymerase gene remains in the 3′ to 5′ orientation, and the payload is not expressed. In the absence of oxygen, FNR dimerizes and binds the FNR-responsive promoter, the recombinase is expressed, the T7 polymerase gene is reverted to the 5′ to 3′ orientation, and the payload is expressed.

[0439] Isolated Plasmids

[0440] In other embodiments, the disclosure provides an isolated plasmid comprising a first nucleic acid encoding a first payload operably linked to a first inducible promoter, and a second nucleic acid encoding a second payload operably linked to a second inducible promoter. In other embodiments, the disclosure provides an isolated plasmid further comprising a third nucleic acid encoding a third payload operably linked to a third inducible promoter. In other embodiments, the disclosure provides a plasmid comprising four, five, six, or more nucleic acids encoding four, five, six, or more payloads operably linked to inducible promoters. In any of the embodiments described here, the first, second, third, fourth, fifth, sixth, etc “payload(s)” can be a branched chain amino acid catabolism enzyme, a transporter of branched chain amino acids, a binding protein of branched chain amino acids, or other sequence described herein. In one embodiment, the nucleic acid encoding the first payload and the nucleic acid encoding the second payload are operably linked to the first inducible promoter. In one embodiment, the nucleic acid encoding the first payload is operably linked to a first inducible promoter and the nucleic acid encoding the second payload is operably linked to a second inducible promoter. In one embodiment, the first inducible promoter and the second inducible promoter are separate copies of the same inducible promoter. In another embodiment, the first inducible promoter and the second inducible promoter are different inducible promoters. In other embodiments comprising a third nucleic acid, the nucleic acid encoding the third payload and the nucleic acid encoding the first and second payloads are all operably linked to the same inducible promoter. In other embodiments, the nucleic acid encoding the first payload is operably linked to a first inducible promoter, the nucleic acid encoding the second payload is operably linked to a second inducible promoter, and the nucleic acid encoding the third payload is operably linked to a third inducible promoter. In some embodiments, the first, second, and third inducible promoters are separate copies of the same inducible promoter. In other embodiments, the first inducible promoter, the second inducible promoter, and the third inducible promoter are different inducible promoters. In some embodiments, the first promoter, the second promoter, and the optional third promoter, or the first promoter and the second promoter and the optional third promoter, are each directly or indirectly induced by low-oxygen or anaerobic conditions. In other embodiments, the first promoter, the second promoter, and the optional third promoter, or the first promoter and the second promoter and the optional third promoter, are each a fumarate and nitrate reduction regulator (FNR) responsive promoter. In other embodiments, the first promoter, the second promoter, and the optional third promoter, or the first promoter and the second promoter and the optional third promoter are each a ROS-inducible regulatory region. In other embodiments, the first promoter, the second promoter, and the optional third promoter, or the first promoter and the second promoter and the optional third promoter are each a RNS-inducible regulatory region.

[0441] In some embodiments, the heterologous gene encoding a branched chain amino acid catabolism enzyme is operably linked to a constitutive promoter. In one embodiment, the constitutive promoter is a lac promoter. In another embodiment, the constitutive promoter is a tet promoter. In another embodiment, the constitutive promoter is a constitutive Escherichia coli σ³² promoter. In another embodiment, the constitutive promoter is a constitutive Escherichia coli σ⁷⁰ promoter. In another embodiment, the constitutive promoter is a constitutive Bacillus subtilis σ^{A} promoter. In another embodiment, the constitutive promoter is a constitutive Bacillus subtilis σ^{B} promoter. In another embodiment, the constitutive promoter is a Salmonella promoter. In other embodiments, the constitutive promoter is a bacteriophage T7 promoter. In other embodiments, the constitutive promoter is and a bacteriophage SP6 promoter. In any of the above-described embodiments, the plasmid further comprises a heterologous gene encoding a transporter of a branched chain amino acid, a BCAA binding protein, and/or a kill switch construct, which may be operably linked to a constitutive promoter or an inducible promoter.

[0442] In some embodiments, the isolated plasmid comprises at least one heterologous branched chain amino acid catabolism enzyme gene operably linked to a first inducible promoter; a heterologous gene encoding a TetR protein operably linked to a P_{araBAD} promoter, a heterologous gene encoding AraC operably linked to a P_{araC} promoter, a heterologous gene encoding an antitoxin operably linked to a constitutive promoter, and a heterologous gene encoding a toxin operably linked to a P_{TetR} promoter. In another embodiment, the isolated plasmid comprises at least one heterologous gene encoding a branched chain amino acid catabolism enzyme operably linked to a first inducible promoter; a heterologous gene encoding a TetR protein and an anti-toxin operably linked to a P_{araBAD} promoter, a heterologous gene encoding AraC operably linked to a P_{araC} promoter, and a heterologous gene encoding a toxin operably linked to a P_{TetR} promoter.

[0443] In one embodiment, the plasmid is a high-copy plasmid. In another embodiment, the plasmid is a low-copy plasmid.

[0444] In another aspect, the disclosure provides a recombinant bacterial cell comprising an isolated plasmid described herein. In another embodiment, the disclosure provides a pharmaceutical composition comprising the recombinant bacterial cell.

[0445] Integration

[0446] In some embodiments, any of the gene(s) or gene cassette(s) of the present disclosure may be integrated into the bacterial chromosome at one or more integration sites. One or more copies of the gene (for example, an amino acid catabolism gene, BCAA transporter gene, and/or BCAA binding protein gene) or gene cassette (for example, a gene cassette comprising an amino acid catabolism gene, an amino acid transporter gene, a BCAA binding protein gene) may be integrated into the bacterial chromosome. Having multiple copies of the gene or gene cassette integrated into the chromosome allows for greater production of the payload, e.g., amino acid catabolism enzyme, BCAA transporter gene, and/or BCAA binding protein gene and other enzymes of a gene cassette, and also permits fine-tuning of the level of expression. Alternatively, different circuits described herein, such as any of the kill-switch circuits, in addition to the therapeutic gene(s) or gene cassette(s) could be integrated into the bacterial chromosome at one or more different integration sites to perform multiple different functions.

[0447] Pharmaceutical Compositions and Formulations

[0448] Pharmaceutical compositions comprising the genetically engineered microorganisms of the invention may be used to treat, manage, ameliorate, and/or prevent a disorder associated with branched chain amino acid catabolism or symptom(s) associated with diseases or disorders associated with branched chain amino acid catabolism. Pharmaceutical compositions of the invention comprising one or more genetically engineered bacteria, and/or one or more genetically engineered yeast or virus, alone or in combination with prophylactic agents, therapeutic agents, and/or pharmaceutically acceptable carriers are provided.

[0449] In certain embodiments, the pharmaceutical composition comprises one species, strain, or subtype of bacteria that are engineered to comprise one or more of the genetic modifications described herein, e.g., selected from expression of at least one branched chain amino acid catabolism enzyme, BCAA transporter, BCAA binding protein, auxotrophy, kill-switch, exporter knock-out, etc. In alternate embodiments, the pharmaceutical composition comprises two or more species, strains, and/or subtypes of bacteria that are each engineered to comprise the genetic modifications described herein.

[0450] The pharmaceutical compositions of the invention described herein may be formulated in a conventional manner using one or more physiologically acceptable carriers comprising excipients and auxiliaries, which facilitate processing of the active ingredients into compositions for pharmaceutical use. Methods of formulating pharmaceutical compositions are known in the art (see, e.g., “Remington's Pharmaceutical Sciences,” Mack Publishing Co., Easton, Pa.). In some embodiments, the pharmaceutical compositions are subjected to tabletting, lyophilizing, direct compression, conventional mixing, dissolving, granulating, levigating, emulsifying, encapsulating, entrapping, or spray drying to form tablets, granulates, nanoparticles, nanocapsules, microcapsules, microtablets, pellets, or powders, which may be enterically coated or uncoated. Appropriate formulation depends on the route of administration.

[0451] The genetically engineered microorganisms may be formulated into pharmaceutical compositions in any suitable dosage form (e.g., liquids, capsules, sachet, hard capsules, soft capsules, tablets, enteric coated tablets, suspension powders, granules, or matrix sustained release formations for oral administration) and for any suitable type of administration (e.g., oral, topical, injectable, intravenous, sub-cutaneous, immediate-release, pulsatile-release, delayed-release, or sustained release). Suitable dosage amounts for the genetically engineered bacteria may range from about 104 to 1012 bacteria. The composition may be administered once or more daily, weekly, or monthly. The composition may be administered before, during, or following a meal. In one embodiment, the pharmaceutical composition is administered before the subject eats a meal. In one embodiment, the pharmaceutical composition is administered currently with a meal. In on embodiment, the pharmaceutical composition is administered after the subject eats a meal

[0452] The genetically engineered bacteria or genetically engineered yeast or virus may be formulated into pharmaceutical compositions comprising one or more pharmaceutically acceptable carriers, thickeners, diluents, buffers, buffering agents, surface active agents, neutral or cationic lipids, lipid complexes, liposomes, penetration enhancers, carrier compounds, and other pharmaceutically acceptable carriers or agents. For example, the pharmaceutical composition may include, but is not limited to, the addition of calcium bicarbonate, sodium bicarbonate, calcium phosphate, various sugars and types of starch, cellulose derivatives, gelatin, vegetable oils, polyethylene glycols, and surfactants, including, for example, polysorbate 20. In some embodiments, the genetically engineered bacteria of the invention may be formulated in a solution of sodium bicarbonate, e.g., 1 molar solution of sodium bicarbonate (to buffer an acidic cellular environment, such as the stomach, for example). The genetically engineered bacteria may be administered and formulated as neutral or salt forms. Pharmaceutically acceptable salts include those formed with anions such as those derived from hydrochloric, phosphoric, acetic, oxalic, tartaric acids, etc., and those formed with cations such as those derived from sodium, potassium, ammonium, calcium, ferric hydroxides, isopropylamine, triethylamine, 2-ethylamino ethanol, histidine, procaine, etc.

[0453] The genetically engineered microorganisms may be administered intravenously, e.g., by infusion or injection.

[0454] The genetically engineered microorganisms of the disclosure may be administered intrathecally. In some embodiments, the genetically engineered microorganisms of the invention may be administered orally. The genetically engineered microorganisms disclosed herein may be administered topically and formulated in the form of an ointment, cream, transdermal patch, lotion, gel, shampoo, spray, aerosol, solution, emulsion, or other form well known to one of skill in the art. See, e.g., “Remington's Pharmaceutical Sciences,” Mack Publishing Co., Easton, Pa. In an embodiment, for non-sprayable topical dosage forms, viscous to semi-solid or solid forms comprising a carrier or one or more excipients compatible with topical application and having a dynamic viscosity greater than water are employed. Suitable formulations include, but are not limited to, solutions, suspensions, emulsions, creams, ointments, powders, liniments, salves, etc., which may be sterilized or mixed with auxiliary agents (e.g., preservatives, stabilizers, wetting agents, buffers, or salts) for influencing various properties, e.g., osmotic pressure. Other suitable topical dosage forms include sprayable aerosol preparations wherein the active ingredient in combination with a solid or liquid inert carrier, is packaged in a mixture with a pressurized volatile (e.g., a gaseous propellant, such as freon) or in a squeeze bottle. Moisturizers or humectants can also be added to pharmaceutical compositions and dosage forms. Examples of such additional ingredients are well known in the art. In one embodiment, the pharmaceutical composition comprising the recombinant bacteria of the invention may be formulated as a hygiene product. For example, the hygiene product may be an antibacterial formulation, or a fermentation product such as a fermentation broth. Hygiene products may be, for example, shampoos, conditioners, creams, pastes, lotions, and lip balms.

[0455] The genetically engineered microorganisms disclosed herein may be administered orally and formulated as tablets, pills, dragees, capsules, liquids, gels, syrups, slurries, suspensions, etc. Pharmacological compositions for oral use can be made using a solid excipient, optionally grinding the resulting mixture, and processing the mixture of granules, after adding suitable auxiliaries if desired, to obtain tablets or dragee cores. Suitable excipients include, but are not limited to, fillers such as sugars, including lactose, sucrose, mannitol, or sorbitol; cellulose compositions such as maize starch, wheat starch, rice starch, potato starch, gelatin, gum tragacanth, methyl cellulose, hydroxypropylmethyl-cellulose, sodium carbomethylcellulose; and/or physiologically acceptable polymers such as polyvinylpyrrolidone (PVP) or polyethylene glycol (PEG). Disintegrating agents may also be added, such as cross-linked polyvinylpyrrolidone, agar, alginic acid or a salt thereof such as sodium alginate.

[0456] Tablets or capsules can be prepared by conventional means with pharmaceutically acceptable excipients such as binding agents (e.g., pregelatinised maize starch, polyvinylpyrrolidone, hydroxypropyl methylcellulose, carboxymethylcellulose, polyethylene glycol, sucrose, glucose, sorbitol, starch, gum, kaolin, and tragacanth); fillers (e.g., lactose, microcrystalline cellulose, or calcium hydrogen phosphate); lubricants (e.g., calcium, aluminum, zinc, stearic acid, polyethylene glycol, sodium lauryl sulfate, starch, sodium benzoate, L-leucine, magnesium stearate, talc, or silica); disintegrants (e.g., starch, potato starch, sodium starch glycolate, sugars, cellulose derivatives, silica powders); or wetting agents (e.g., sodium lauryl sulphate). The tablets may be coated by methods well known in the art. A coating shell may be present, and common membranes include, but are not limited to, polylactide, polyglycolic acid, polyanhydride, other biodegradable polymers, alginate-polylysine-alginate (APA), alginate-polymethylene-co-guanidine-alginate (A-PMCG-A), hydroymethylacrylate-methyl methacrylate (HEMA-MMA), multilayered HEMA-MMA-MAA, polyacrylonitrilevinylchloride (PAN-PVC), acrylonitrile/sodium methallylsulfonate (AN-69), polyethylene glycol/poly pentamethylcyclopentasiloxane/polydimethylsiloxane (PEG/PD5/PDMS), poly N,N-dimethyl acrylamide (PDMAAm), siliceous encapsulates, cellulose sulphate/sodium alginate/polymethylene-co-guanidine (CS/A/PMCG), cellulose acetate phthalate, calcium alginate, k-carrageenan-locust bean gum gel beads, gellan-xanthan beads, poly(lactide-co-glycolides), carrageenan, starch poly-anhydrides, starch polymethacrylates, polyamino acids, and enteric coating polymers.

[0457] In some embodiments, the genetically engineered microorganisms are enterically coated for release into the gut or a particular region of the gut, for example, the large intestine. The typical pH profile from the stomach to the colon is about 1-4 (stomach), 5.5-6 (duodenum), 7.3-8.0 (ileum), and 5.5-6.5 (colon). In some diseases, the pH profile may be modified. In some embodiments, the coating is degraded in specific pH environments in order to specify the site of release. In some embodiments, at least two coatings are used. In some embodiments, the outside coating and the inside coating are degraded at different pH levels.

[0458] Liquid preparations for oral administration may take the form of solutions, syrups, suspensions, or a dry product for constitution with water or other suitable vehicle before use. Such liquid preparations may be prepared by conventional means with pharmaceutically acceptable agents such as suspending agents (e.g., sorbitol syrup, cellulose derivatives, or hydrogenated edible fats); emulsifying agents (e.g., lecithin or acacia); non-aqueous vehicles (e.g., almond oil, oily esters, ethyl alcohol, or fractionated vegetable oils); and preservatives (e.g., methyl or propyl-p-hydroxybenzoates or sorbic acid). The preparations may also contain buffer salts, flavoring, coloring, and sweetening agents as appropriate. Preparations for oral administration may be suitably formulated for slow release, controlled release, or sustained release of the genetically engineered microorganisms described herein.

[0459] In one embodiment, the genetically engineered microorganisms of the disclosure may be formulated in a composition suitable for administration to pediatric subjects. As is well known in the art, children differ from adults in many aspects, including different rates of gastric emptying, pH, gastrointestinal permeability, etc. (Ivanovska et al., Pediatrics, 134(2):361-372, 2014). Moreover, pediatric formulation acceptability and preferences, such as route of administration and taste attributes, are critical for achieving acceptable pediatric compliance. Thus, in one embodiment, the composition suitable for administration to pediatric subjects may include easy-to-swallow or dissolvable dosage forms, or more palatable compositions, such as compositions with added flavors, sweeteners, or taste blockers. In one embodiment, a composition suitable for administration to pediatric subjects may also be suitable for administration to adults.

[0460] In one embodiment, the composition suitable for administration to pediatric subjects may include a solution, syrup, suspension, elixir, powder for reconstitution as suspension or solution, dispersible/effervescent tablet, chewable tablet, gummy candy, lollipop, freezer pop, troche, chewing gum, oral thin strip, orally disintegrating tablet, sachet, soft gelatin capsule, sprinkle oral powder, or granules. In one embodiment, the composition is a gummy candy, which is made from a gelatin base, giving the candy elasticity, desired chewy consistency, and longer shelf-life. In some embodiments, the gummy candy may also comprise sweeteners or flavors.

[0461] In one embodiment, the composition suitable for administration to pediatric subjects may include a flavor. As used herein, “flavor” is a substance (liquid or solid) that provides a distinct taste and aroma to the formulation. Flavors also help to improve the palatability of the formulation. Flavors include, but are not limited to, strawberry, vanilla, lemon, grape, bubble gum, and cherry.

[0462] In certain embodiments, the genetically engineered microorganisms may be orally administered, for example, with an inert diluent or an assimilable edible carrier. The compound may also be enclosed in a hard or soft shell gelatin capsule, compressed into tablets, or incorporated directly into the subject's diet. For oral therapeutic administration, the compounds may be incorporated with excipients and used in the form of ingestible tablets, buccal tablets, troches, capsules, elixirs, suspensions, syrups, wafers, and the like. To administer a compound by other than parenteral administration, it may be necessary to coat the compound with, or co-administer the compound with, a material to prevent its inactivation.

[0463] In another embodiment, the pharmaceutical composition comprising the recombinant bacteria of the invention may be a comestible product, for example, a food product. In one embodiment, the food product is milk, concentrated milk, fermented milk (yogurt, sour milk, frozen yogurt, lactic acid bacteria-fermented beverages), milk powder, ice cream, cream cheeses, dry cheeses, soybean milk, fermented soybean milk, vegetable-fruit juices, fruit juices, sports drinks, confectionery, candies, infant foods (such as infant cakes), nutritional food products, animal feeds, or dietary supplements. In one embodiment, the food product is a fermented food, such as a fermented dairy product. In one embodiment, the fermented dairy product is yogurt. In another embodiment, the fermented dairy product is cheese, milk, cream, ice cream, milk shake, or kefir. In another embodiment, the recombinant bacteria of the invention are combined in a preparation containing other live bacterial cells intended to serve as probiotics. In another embodiment, the food product is a beverage. In one embodiment, the beverage is a fruit juice-based beverage or a beverage containing plant or herbal extracts. In another embodiment, the food product is a jelly or a pudding. Other food products suitable for administration of the recombinant bacteria of the invention are well known in the art. For example, see U.S. 2015/0359894 and US 2015/0238545, the entire contents of each of which are expressly incorporated herein by reference. In yet another embodiment, the pharmaceutical composition of the invention is injected into, sprayed onto, or sprinkled onto a food product, such as bread, yogurt, or cheese.

[0464] In some embodiments, the composition is formulated for intraintestinal administration, intrajejunal administration, intraduodenal administration, intraileal administration, gastric shunt administration, or intracolic administration, via nanoparticles, nanocapsules, microcapsules, or microtablets, which are enterically coated or uncoated. The pharmaceutical compositions may also be formulated in rectal compositions such as suppositories or retention enemas, using, e.g., conventional suppository bases such as cocoa butter or other glycerides. The compositions may be suspensions, solutions, or emulsions in oily or aqueous vehicles, and may contain suspending, stabilizing and/or dispersing agents.

[0465] The genetically engineered microorganisms described herein may be administered intranasally, formulated in an aerosol form, spray, mist, or in the form of drops, and conveniently delivered in the form of an aerosol spray presentation from pressurized packs or a nebuliser, with the use of a suitable propellant (e.g., dichlorodifluoromethane, trichlorofluoromethane, dichlorotetrafluoroethane, carbon dioxide or other suitable gas). Pressurized aerosol dosage units may be determined by providing a valve to deliver a metered amount. Capsules and cartridges (e.g., of gelatin) for use in an inhaler or insufflator may be formulated containing a powder mix of the compound and a suitable powder base such as lactose or starch.

[0466] The genetically engineered microorganisms may be administered and formulated as depot preparations. Such long acting formulations may be administered by implantation or by injection, including intravenous injection, subcutaneous injection, local injection, direct injection, or infusion. For example, the compositions may be formulated with suitable polymeric or hydrophobic materials (e.g., as an emulsion in an acceptable oil) or ion exchange resins, or as sparingly soluble derivatives (e.g., as a sparingly soluble salt).

[0467] In some embodiments, disclosed herein are pharmaceutically acceptable compositions in single dosage forms. Single dosage forms may be in a liquid or a solid form. Single dosage forms may be administered directly to a patient without modification or may be diluted or reconstituted prior to administration. In certain embodiments, a single dosage form may be administered in bolus form, e.g., single injection, single oral dose, including an oral dose that comprises multiple tablets, capsule, pills, etc. In alternate embodiments, a single dosage form may be administered over a period of time, e.g., by infusion.

[0468] Single dosage forms of the pharmaceutical composition may be prepared by portioning the pharmaceutical composition into smaller aliquots, single dose containers, single dose liquid forms, or single dose solid forms, such as tablets, granulates, nanoparticles, nanocapsules, microcapsules, microtablets, pellets, or powders, which may be enterically coated or uncoated. A single dose in a solid form may be reconstituted by adding liquid, typically sterile water or saline solution, prior to administration to a patient.

[0469] In other embodiments, the composition can be delivered in a controlled release or sustained release system. In one embodiment, a pump may be used to achieve controlled or sustained release. In another embodiment, polymeric materials can be used to achieve controlled or sustained release of the therapies of the present disclosure (see e.g., U.S. Pat. No. 5,989,463). Examples of polymers used in sustained release formulations include, but are not limited to, poly(2-hydroxy ethyl methacrylate), poly(methyl methacrylate), poly(acrylic acid), poly(ethylene-co-vinyl acetate), poly(methacrylic acid), polyglycolides (PLG), polyanhydrides, poly(N-vinyl pyrrolidone), poly(vinyl alcohol), polyacrylamide, poly(ethylene glycol), polylactides (PLA), poly(lactide-co-glycolides) (PLGA), and polyorthoesters. The polymer used in a sustained release formulation may be inert, free of leachable impurities, stable on storage, sterile, and biodegradable. In some embodiments, a controlled or sustained release system can be placed in proximity of the prophylactic or therapeutic target, thus requiring only a fraction of the systemic dose. Any suitable technique known to one of skill in the art may be used.

[0470] Dosage regimens may be adjusted to provide a therapeutic response. Dosing can depend on several factors, including severity and responsiveness of the disease, route of administration, time course of treatment (days to months to years), and time to amelioration of the disease. For example, a single bolus may be administered at one time, several divided doses may be administered over a predetermined period of time, or the dose may be reduced or increased as indicated by the therapeutic situation. The specification for the dosage is dictated by the unique characteristics of the active compound and the particular therapeutic effect to be achieved. Dosage values may vary with the type and severity of the condition to be alleviated. For any particular subject, specific dosage regimens may be adjusted overtime according to the individual need and the professional judgment of the treating clinician. Toxicity and therapeutic efficacy of compounds provided herein can be determined by standard pharmaceutical procedures in cell culture or animal models. For example, LD50, ED50, EC50, and IC50 may be determined, and the dose ratio between toxic and therapeutic effects (LD50/ED50) may be calculated as the therapeutic index. Compositions that exhibit toxic side effects may be used, with careful modifications to minimize potential damage to reduce side effects. Dosing may be estimated initially from cell culture assays and animal models. The data obtained from in vitro and in vivo assays and animal studies can be used in formulating a range of dosage for use in humans.

[0471] The ingredients are supplied either separately or mixed together in unit dosage form, for example, as a dry lyophilized powder or water-free concentrate in a hermetically sealed container such as an ampoule or sachet indicating the quantity of active agent. If the mode of administration is by injection, an ampoule of sterile water for injection or saline can be provided so that the ingredients may be mixed prior to administration.

[0472] The pharmaceutical compositions may be packaged in a hermetically sealed container such as an ampoule or sachet indicating the quantity of the agent. In one embodiment, one or more of the pharmaceutical compositions is supplied as a dry sterilized lyophilized powder or water-free concentrate in a hermetically sealed container and can be reconstituted (e.g., with water or saline) to the appropriate concentration for administration to a subject. In an embodiment, one or more of the prophylactic or therapeutic agents or pharmaceutical compositions is supplied as a dry sterile lyophilized powder in a hermetically sealed container stored between 2° C. and 8° C. and administered within 1 hour, within 3 hours, within 5 hours, within 6 hours, within 12 hours, within 24 hours, within 48 hours, within 72 hours, or within one week after being reconstituted. Cryoprotectants can be included for a lyophilized dosage form, principally 0-10% sucrose (optimally 0.5-1.0%). Other suitable cryoprotectants include trehalose and lactose. Other suitable bulking agents include glycine and arginine, either of which can be included at a concentration of 0-0.05%, and polysorbate-80 (optimally included at a concentration of 0.005-0.01%). Additional surfactants include but are not limited to polysorbate 20 and BRIJ surfactants. The pharmaceutical composition may be prepared as an injectable solution and can further comprise an agent useful as an adjuvant, such as those used to increase absorption or dispersion, e.g., hyaluronidase.

[0473] In some embodiments, the genetically engineered viruses are prepared for delivery, taking into consideration the need for efficient delivery and for overcoming the host antiviral immune response. Approaches to evade antiviral response include the administration of different viral serotypes as part of the treatment regimen (serotype switching), formulation, such as polymer coating to mask the virus from antibody recognition and the use of cells as delivery vehicles.

[0474] In another embodiment, the composition can be delivered in a controlled release or sustained release system. In one embodiment, a pump may be used to achieve controlled or sustained release. In another embodiment, polymeric materials can be used to achieve controlled or sustained release of the therapies of the present disclosure (see e.g., U.S. Pat. No. 5,989,463). Examples of polymers used in sustained release formulations include, but are not limited to, poly(2-hydroxy ethyl methacrylate), poly(methyl methacrylate), poly(acrylic acid), poly(ethylene-co-vinyl acetate), poly(methacrylic acid), polyglycolides (PLG), polyanhydrides, poly(N-vinyl pyrrolidone), poly(vinyl alcohol), polyacrylamide, poly(ethylene glycol), polylactides (PLA), poly(lactide-co-glycolides) (PLGA), and polyorthoesters. The polymer used in a sustained release formulation may be inert, free of leachable impurities, stable on storage, sterile, and biodegradable. In some embodiments, a controlled or sustained release system can be placed in proximity of the prophylactic or therapeutic target, thus requiring only a fraction of the systemic dose. Any suitable technique known to one of skill in the art may be used.

[0475] The genetically engineered bacteria of the invention may be administered and formulated as neutral or salt forms. Pharmaceutically acceptable salts include those formed with anions such as those derived from hydrochloric, phosphoric, acetic, oxalic, tartaric acids, etc., and those formed with cations such as those derived from sodium, potassium, ammonium, calcium, ferric hydroxides, isopropylamine, triethylamine, 2-ethylamino ethanol, histidine, procaine, etc. In vivo Methods

[0476] The recombinant bacteria disclosed herein may be evaluated in vivo, e.g., in an animal model. Any suitable animal model of a disease or condition associated with catabolism of a branched chain amino acid may be used (see, e.g., Skvorak, J. Inherit. Metab. Dis., 2009, 32:229-246 and Homanics et al., BMC Med. Genet., 2006, 7(33):1-13), including the Dbt−/− model (E2 subunit of BCKDH, which has a 3-fold increase in blood and urine BCAA levels and results in neonatal lethalthy) (serves as classic MSUD model). This model is partially rescued by two transgenes (LAP-tTA and TRE-E2), allowing 5-6% of normal BCKDH activity and an increase in mice survival to three or four weeks (serves as an intermediate MSUD model) (as described in Homanics et al., 2006, the contents of which is herein incorporated by reference in its entirety). In addition, intermediate MSUD mice can be used to show development of neuropathology with striking similarity to human MSUD. In this model, branched-chain amino acid accumulation was associated with neurotransmitter deficiency, behavioral changes and limited survival, and providing intermediate MSUD mice with a choice between normal and branched-chain amino acid free diet prevented brain injury and dramatically improved survival (Zinnanti et al., Dual mechanism of brain injury and novel treatment strategy in maple syrup urine disease; Brain 2009: 132; 903-918, the contents of which is herein incorporated by reference in its entirety). In some embodiments, the animal model is a mouse model of Maple Syrup Urine Disease. In one embodiment, the mouse model of MSUD is a branched-chain amino transferase knockout mouse (Wu et al., J. Clin. Invest, 113:434-440, 2004 or She et al., Cell Metabol., 6:181-194, 2007). In another embodiment, the mouse model of MSUD is a dihydrolipoamine dehydrogenase (E3) subunit knock-out mouse (Johnson et al., Proc. Natl. Acad. Sci. U.S.A., 94:14512-14517, 1997). In another embodiment, the mouse model of classic MSUD is a deletion of exon 5 and part of exon 4 of the E2 subunit of the branched-chain alpha-keto acid dehydrogenase (Homanics et al., BMC Med. Genet., 7:33, 2006) or the mouse model of intermediate MSUD (Homanics et al., BMC Med. Genet., 7:33, 2006). In another embodiment, the model is a Polled Shorthorn calf model of disease or a Polled Hereford calf model of disease (Harper et al., Aus. Vet. J., 66(2):46-49, 1988). Other relevant animal models include those described in She et al., Cell Metab. 2007 September; 6(3): 181-194; Wu et al., J. Clin. Invest. 113:434-440 (2004); Bridi, et al., J. Neurosci Methods, 2006 Sep. 15; 155(2):224-30.

[0477] The recombinant bacterial cells disclosed herein may administered to the animal, e.g., by oral gavage, and treatment efficacy is determined, e.g., by measuring blood leucine levels before and after treatment. The animal may be sacrificed, and tissue samples may be collected and analyzed.

[0478] Methods of Screening

[0479] Generation of Bacterial Strains with Enhance Ability to Transport Amino Acids

[0480] Due to their ease of culture, short generation times, very high population densities and small genomes, microbes can be evolved to unique phenotypes in abbreviated timescales. Adaptive laboratory evolution (ALE) is the process of passaging microbes under selective pressure to evolve a strain with a preferred phenotype. Most commonly, this is applied to increase utilization of carbon/energy sources or adapting a strain to environmental stresses (e.g., temperature, pH), whereby mutant strains more capable of growth on the carbon substrate or under stress will outcompete the less adapted strains in the population and will eventually come to dominate the population.

[0481] This same process can be extended to any essential metabolite by creating an auxotroph. An auxotroph is a strain incapable of synthesizing an essential metabolite and must therefore have the metabolite provided in the media to grow. In this scenario, by making an auxotroph and passaging it on decreasing amounts of the metabolite, the resulting dominant strains should be more capable of obtaining and incorporating this essential metabolite.

[0482] For example, if the biosynthetic pathway for producing an amino acid is disrupted a strain capable of high-affinity capture of said amino acid can be evolved via ALE. First, the strain is grown in varying concentrations of the auxotrophic amino acid, until a minimum concentration to support growth is established. The strain is then passaged at that concentration, and diluted into lowering concentrations of the amino acid at regular intervals. Over time, cells that are most competitive for the amino acid—at growth-limiting concentrations—will come to dominate the population. These strains will likely have mutations in their amino acid-transporters resulting in increased ability to import the essential and limiting amino acid.

[0483] Similarly, by using an auxotroph that cannot use an upstream metabolite to form an amino acid, a strain can be evolved that not only can more efficiently import the upstream metabolite, but also convert the metabolite into the essential downstream metabolite. These strains will also evolve mutations to increase import of the upstream metabolite, but may also contain mutations which increase expression or reaction kinetics of downstream enzymes, or that reduce competitive substrate utilization pathways.

[0484] A metabolite innate to the microbe can be made essential via mutational auxotrophy and selection applied with growth-limiting supplementation of the endogenous metabolite. However, phenotypes capable of consuming non-native compounds can be evolved by tying their consumption to the production of an essential compound. For example, if a gene from a different organism is isolated which can produce an essential compound or a precursor to an essential compound this gene can be recombinantly introduced and expressed in the heterologous host. This new host strain will now have the ability to synthesize an essential nutrient from a previously non-metabolizable substrate.

[0485] Hereby, a similar ALE process can be applied by creating an auxotroph incapable of converting an immediately downstream metabolite and selecting in growth-limiting amounts of the non-native compound with concurrent expression of the recombinant enzyme. This will result in mutations in the transport of the non-native substrate, expression and activity of the heterologous enzyme and expression and activity of downstream native enzymes. It should be emphasized that the key requirement in this process is the ability to tether the consumption of the non-native metabolite to the production of a metabolite essential to growth.

[0486] Once the basis of the selection mechanism is established and minimum levels of supplementation have been established, the actual ALE experimentation can proceed. Throughout this process several parameters must be vigilantly monitored. It is important that the cultures are maintained in an exponential growth phase and not allowed to reach saturation/stationary phase. This means that growth rates must be check during each passaging and subsequent dilutions adjusted accordingly. If growth rate improves to such a degree that dilutions become large, then the concentration of auxotrophic supplementation should be decreased such that growth rate is slowed, selection pressure is increased and dilutions are not so severe as to heavily bias subpopulations during passaging. In addition, at regular intervals cells should be diluted, grown on solid media and individual clones tested to confirm growth rate phenotypes observed in the ALE cultures.

[0487] Predicting when to halt the stop the ALE experiment also requires vigilance. As the success of directing evolution is tied directly to the number of mutations “screened” throughout the experiment and mutations are generally a function of errors during DNA replication, the cumulative cell divisions (CCD) acts as a proxy for total mutants which have been screened. Previous studies have shown that beneficial phenotypes for growth on different carbon sources can be isolated in about 10^{11.2} CCD¹. This rate can be accelerated by the addition of chemical mutagens to the cultures—such as N-methyl-N-nitro-N-nitrosoguanidine (NTG)—which causes increased DNA replication errors. However, when continued passaging leads to marginal or no improvement in growth rate the population has converged to some fitness maximum and the ALE experiment can be halted.

[0488] At the conclusion of the ALE experiment, the cells should be diluted, isolated on solid media and assayed for growth phenotypes matching that of the culture flask. Best performers from those selected are then prepped for genomic DNA and sent for whole genome sequencing. Sequencing with reveal mutations occurring around the genome capable of providing improved phenotypes, but will also contain silent mutations (those which provide no benefit but do not detract from desired phenotype). In cultures evolved in the presence of NTG or other chemical mutagen, there will be significantly more silent, background mutations. If satisfied with the best performing strain in its current state, the user can proceed to application with that strain. Otherwise the contributing mutations can be deconvoluted from the evolved strain by reintroducing the mutations to the parent strain by genome engineering techniques. See Lee, D.-H., Feist, A. M., Barrett, C. L. & Palsson, B. O. Cumulative Number of Cell Divisions as a Meaningful Timescale for Adaptive Laboratory Evolution of Escherichia coli. PLoS ONE 6, e26172 (2011).

[0489] Similar methods can be used to generate E. coli Nissle mutants that consume or import branched chain amino acids, e.g., leucine, valine, and/or isoleucine.

Specific Screen to Identify Strains with Improved BCAA Degradation Enzyme Activity

[0490] Screens using genetic selection are conducted to improve BCAA consumption in the genetically engineered bacteria. Toxic BCAA analogs exert their mechanism of action (MOA) by being incorporated into cellular protein, causing cell death. These compounds, e.g., fluoro-leucine and/or aza-leucine, have utility in an untargeted approach to select BCAA enzymes with increased activity. Assuming that these toxic compounds can be metabolized by BCAA enzymes into a non-toxic metabolite, rather than being incorporated into cellular protein, genetically engineered bacteria which have improved BCAA degradation activity can tolerate higher levels of these compounds, and can be screened for and selected on this basis.

Use of Valine and Leucine Sensitivity to Identify Strains with Improved BCAA Degradation Enzyme Activity

[0491] Valine and Leucine sensitivity can be used as a genetic screening tool using the E. coli K12 strain. There are three AHAS (acetohydroxybutanoate synthase) isozymes in E. coli (AHAS I: ilvBN, AHAS II: ilvGM, and AHAS III: ilvIH). Valine and leucine exert feedback inhibition on AHAS I and AHAS III; AHAS II is resistant to Val and Leu inhibition. E. coli K12 has a frameshift mutation in ilvG (AHAS II) and is unable to produce BCAA endogenously in the presence of valine and leucine. In contrast, E. coli Nissle has a functional ilvG and is insensitive to valine and leucine and therefore cannot be used for this screen. A genetically engineered strain derived from E. coli K12, which more efficiently degrades leucine, has a greater reduction in sensitivity to leucine (through relieving the feedback inhibition on AHAS I and III). As a result, this pathway can be used as a tool to select and identify a strain with improved resistance to leucine.

[0492] Use of Leucine Auxotrophy and D-Leucine as a Method to Identify Strains with Improved BCAA Uptake Ability.

[0493] Bacterial mutants with increased leucine transport into the bacterial cell may be identified using a leucine auxotroph and providing D-leucine instead of L-leucine in the media, as D-leucine can be imported through the same transporters. The bacteria can grow in the presence of D-leucine, because the bacterial stain has a racemase, which can convert D-leucine to L-leucine. However, the uptake of D-leucine through LivKHMGF is less efficient than the uptake of L-leucine. The leucine auxotroph can still grow if high concentrations of D-Leucine are provided, even though the D-leucine uptake is less efficient than L-leucine uptake. When concentrations of D-leucine in the media are lowered, the cells can no longer grow, unless transport efficiency is increased, ergo, mutants with increased D-leucine uptake can be selected.

[0494] Methods of Treatment

[0495] Further disclosed herein are methods of treating a disease or disorder associated with the catabolism of a branched chain amino acid. In some embodiments, disclosed herein are methods for reducing, ameliorating, or eliminating one or more symptom(s) associated with these diseases or disorders. In one embodiment, the disorder involving the catabolism of a branched chain amino acid is a metabolic disorder involving the abnormal catabolism of a branched chain amino acid. Metabolic diseases associated with abnormal catabolism of a branched chain amino acid include maple syrup urine disease (MSUD), isovaleric acidemia, propionic acidemia, methylmalonic acidemia, diabetes ketoacidosis, MCC Deficiency, 3-Methylglutaconyl-CoA hydratase Deficiency, HMG-CoA Lyase Deficiency, Acetyl-CoA Carboxylase Deficiency, Malonyl-CoA Decarboxylase Deficiency, short-branched chain acylCoA dehydrogenase deficiency, 2-methyl-3-hydroxybutyric acidemia, beta-ketothiolase deficiency, isobutyryl-CoA dehydrogenase deficiency, HIBCH deficiency), and 3-Hydroxyisobutyric aciduria.

[0496] In one embodiment, the disease associated with abnormal catabolism of a branched chain amino acid is isovaleric acidemia. In one embodiment, the disease associated with abnormal catabolism of a branched chain amino acid is propionic acidemia. In one embodiment, the disease associated with abnormal catabolism of a branched chain amino acid is methylmalonic acidemia. In another embodiment, the disease associated with abnormal catabolism of a branched chain amino acid is diabetes.

[0497] In one embodiment, the disease is maple syrup urine disease (MSUD). Maple syrup urine disease (MSUD), also known as branched-chain ketoaciduria, is an autosomal recessive metabolic disorder caused by impaired activity of the branched-chain α-keto acid dehydrogenase (BCKDH) complex (Skvorak 2009). The overall incidence for MSUD is 1:185,000, although it is higher in certain populations, such as Mennonites, where the incidence is 1:176. The BCKDH complex is responsible for the oxidative decarboxylation of branched-chain keto acids (BCKAs) derived from branched chain amino acids (BCAAs) (Homanics et al. 2006). Patients with MSUD are unable to properly process BCKAs, which can lead to the toxic accumulation of BCAAs and their derivatives in the blood, cerebrospinal fluid and tissues (Skvorak 2009). Specifically, deficiencies of the BCKDH complex in MSUD patients results in accumulation of the BCAAs isoleucine, leucine, and valine, as well as their corresponding branched-chain α-keto acids (BCKAs) α-keto-β-methylvalerate, α-ketoisocaproate, and α-ketoisovalerate) in the tissues in plasma. Clinical manifestations of the disease vary depending on the degree of enzyme deficiency and include poor feeding, vomiting, dehydration, lethargy, hypotonia, seizures, hypoglycemia, ketoacidosis, pancreatitis, coma, and neurological decline (Homanics et al. 2009).

[0498] The BCKDH complex is composed of three catalytic components: a dehydrogenase/decarboxylase (E1), which is a heterotetramer composed of two E1α and two E1β subunits, a dihydrolipoyl transacylase (E2), and a dihydrolipoamide dehydrogenase (E3) (Skvorak 2009). Additionally, the complex is associated with two regulatory enzymes, a BCKDH kinase and a BCKDH phosphatase, which control its activity through reversible phosphorylation-dephosphorylation of E1α (Chuang 1998, Homanics et al. 2006). To date, MSUD has been associated with mutations in the E1, E2 and E3 subunits of the BCKDH complex (Cheung 1998, Homanics et al. 2006).

[0499] MSUD is a very complex, genetically heterogeneous disease. At least 150 mutations in genes encoding BCKDH complex components have been identified that result in MSUD (Skvorak 2009). For example, see Table 8 below, adapted from Chuang, J. Pediatrics, 132(3), Part 2, S17-S23, 1998. As indicated below, E2 mutants are the most prevalent in human disease.

TABLE 8
MSUD Phenotypes

| | | | Number of |
|---|---|---|---|
| Molecular | Affected | | Mutations |
| Phenotype | Gene | Clinical Phenotype | Identified |
| IA | E1α | Classic, Intermediate MSUD | 15 |
| IB | E1β | Classic MSUD | 4 |
| II | E2 | Classic, thiamine-responsive | 26 |
| | | MSUD | |
| III | E3 | E3-deficient | 4 |
| IV | Kinase | None reported | None reported |
| V | Phosphatase | None reported | None reported |

[0500] Currently available treatments for MSUD are inadequate for the long term management of the disease and have severe limitations (Svkvorak 2009). A low protein/BCAA-restricted diet, with micronutrient and vitamin supplementation, as necessary, is the widely accepted long-term disease management strategy for MSUD (Homanics et al. 2006). However, BCAA-intake restrictions can be particularly problematic since BCAAs can only be acquired through diet and are necessary for several metabolic activities (Skvorak 2009). Even with proper monitoring and patient compliance, BCAA dietary restrictions result in a high incidence of mental retardation and mortality (Skvorak 2009, Homanics et al 2009). Further, a few cases of MSUD have been treated by liver transplantation (Popescu and Dima 2012) or treatment with phenylbutyrate. However, the limited availability of donor organs, the costs associated with the transplantation itself, and the undesirable effects associated with continued immunosuppressant therapy limit the practicality of liver transplantation for treatment of disease (Homanics et al. 2012, Popescu and Dima 2012). Therefore, there is significant unmet need for effective, reliable, and/or long-term treatment for MSUD.

[0501] The present disclosure surprisingly demonstrates that pharmaceutical compositions comprising the recombinant bacterial cells disclosed herein may be used to treat metabolic diseases involving the abnormal catabolism of a branched chain amino acid, such as MSUD. In one embodiment, the metabolic disease is selected from the group consisting of classic MSUD, intermediate MSUD, intermittent MSUD, E3-Deficient MSUD, and thiamine-responsive MSUD. In one embodiment, the disease is classic MSUD. In another embodiment, the disease is intermediate MSUD. In another embodiment, the disease is intermittent MSUD. In another embodiment, the disease is E3-deficient MSUD. In another embodiment, the disease is thiamine-responsive MSUD.

[0502] In one embodiment, the subject having MSUD has a mutation in an E1α gene. In another embodiment, the subject having MSUD has a mutation in the E1β gene. In another embodiment, the subject having MSUD has a mutation in the E2 gene. In another embodiment, the subject having MSUD has a mutation in the E3 gene.

[0503] In one embodiment, the target degradation rates of branched chain amino acids from food intake in breastfed infants and adults is as indicated in the Table 9, below.

TABLE 9
Target Degradation rates for BCAA.

| Age (year) | <1 | | | 1-3 | | | 4-8 | | | 8-12 | | | >12 | | |
|---|---|---|---|---|---|---|---|---|---|---|---|---|---|---|---|
| Amino acid: Leu (L) Val (V) Ile (I) | L | V | I | L | V | I | L | V | I | L | V | I | L | V | I |
| MSUD patient daily tolerance (mg/kg) | 40 | 30 | 20 | 20 | 10 | 5 | 5 | 10 | 5 | 5 | 10 | 5 | 5 | 10 | 5 |
| Recommended Dietary Allowance | 93 | 58 | 43 | 63 | 37 | 28 | 49 | 28 | 22 | 46 | 26 | 20 | 46 | 26 | 20 |
| (RDA) (mg/kg) | | | | | | | | | | | | | | | |
| Target reduction (mg/kg) | 53 | 28 | 23 | 43 | 27 | 23 | 44 | 18 | 17 | 41 | 16 | 15 | 41 | 16 | 15 |
| Target reduction (mg); | 530 | 280 | 230 | 602 | 378 | 322 | 1144 | 468 | 442 | 1681 | 656 | 615 | 2870 | 1120 | 1050 |
| (based on 10, 14, 26, 41 and 70 kg | | | | | | | | | | | | | | | |
| weight for the different age groups) | | | | | | | | | | | | | | | |
| Target reduction (mmol) | 4.04 | 2.39 | 1.75 | 4.59 | 3.23 | 2.45 | 8.72 | 3.99 | 3.37 | 12.81 | 5.60 | 4.69 | 21.88 | 9.56 | 8.00 |
| Target degradation rate | 0.56 | 0.33 | 0.24 | 0.64 | 0.45 | 0.34 | 1.21 | 0.55 | 0.47 | 1.78 | 0.78 | 0.65 | 3.04 | 1.33 | 1.11 |
| (μmol/10⁹ CFUs/hr); | | | | | | | | | | | | | | | |
| (based on 3.10¹¹ CFUs/day dose) | | | | | | | | | | | | | | | |

| | | | | | |
|---|---|---|---|---|---|
| Combined BCAA target degradation | 1.14 | 1.43 | 2.23 | 3.21 | 5.48 |
| rate (mol/10⁹ CFUs/hr) | | | | | |

[0504] In one embodiment, the target degradation rates of branched chain amino acids from food intake in breastfed infants and adults is as indicated in the charts, below.

[0505] The leucine consumption kinetics and dosing are set forth herein. Food intake is based on adult recommended daily allowance of 40 mg/kg/day. MSUD patients are primarily children with restricted protein intake.

[0506] In another embodiment, the disorder involving the catabolism of a branched chain amino acid is a disorder caused by the activation of mTor (mammalian target of rapamycin). mTor is a senne-threonine kinase and has been implicated in a wide range of biological processes including transcription, translation, autophagy, actin organization and ribosome biogenesis, cell growth, cell proliferation, cell motility, and survival. mTOR exists in two complexes, mTORC1 and mTORC2. mTORC1 contains the raptor subunit and mTORC2 contains rictor. These complexes are differentially regulated, and have distinct substrate specificities and rapamycin sensitivity. For example, mTORCl phosphorylates S6 kinase (S6K) and 4EBP1, promoting increased translation and ribosome biogenesis to facilitate cell growth and cell cycle progression. S6K also acts in a feedback pathway to attenuate PI3K/Akt activation. mTORC2 is generally insensitive to rapamycin and is thought to modulate growth factor signaling by phosphorylating the C-terminal hydrophobic motif of some AGC kinases, such as Akt.

[0507] It is known in the art that mTor activation is caused by branched chain amino acids or alpha keto acids in the subject (see, for example, Harlan et al., Cell Metabolism, 17:599-606, 2013). Specifically, activation of mTorC1 (mTor complex 1) is caused by leucine (see Han et al., Cell, 149:410-424, 2012 and Lynch, J. Nutr., 131(3):861S-865S, 2001). Thus, in one embodiment, the disclosure provides methods of treating disorders involving the catabolism of leucine, caused by the activation of mTor by leucine in the subject. In one embodiment, the leucine levels in the subject are normal, and lowering leucine levels in the subject leads to the decreased activity of mTor and, thus, treatment of the disease. In another embodiment, the leucine levels in the subject are increased, and lowering leucine levels in the subject leads to the decreased activity of mTor and, thus, treatment of the disease. In one embodiment, the activation of mTor is increased as compared to the normal level of activation of mTor in a healthy subject, and lowering leucine levels in the subject leads to the decreased activation of mTor and, thus, treatment of the disease. In one embodiment, the level of activity of mTor is increased as compared to the normal level of activity of mTor in a healthy subject, and lowering leucine levels in the subject leads to the decreased activity of mTor and, thus, treatment of the disease. In another embodiment, the expression of mTor is increased as compared to the normal level of expression of mTor in a healthy subject, and lowering leucine levels in the subject leads to the decreased activity of mTor and, thus, treatment of the disease. In one embodiment, the activation of mTor is an abnormal activation of mTor.

[0508] Diseases caused by the activation of mTor are known in the art. See, for example, Laplante and Sabatini, Cell, 149(2):74-293, 2012. As used herein, the term “disease caused by the activation of mTor” includes cancer, obesity, type 2 diabetes, neurodegeneration, autism, Alzheimer's disease, Lymphangioleiomyomatosis (LAM), transplant rejection, glycogen storage disease, obesity, tuberous sclerosis, hypertension, cardiovascular disease, hypothalamic activation, musculoskeletal disease, Parkinson's disease, Huntington's disease, psoriasis, rheumatoid arthritis, lupus, multiple sclerosis, Leigh's syndrome, and Friedrich's ataxia.

[0509] In another aspect, the disclosure provides methods for decreasing the plasma level of at least one branched chain amino acid or branched chain α-keto acid in a subject by administering a pharmaceutical composition comprising a bacterial cell disclosed herein to the subject, thereby decreasing the plasma level of the at least one branched chain amino acid or branched chain alpha-keto acid or other BCAA metabolite in the subject. In one embodiment, the subject has a disease or disorder involving the catabolism of a branched chain amino acid. In one embodiment, the disorder involving the catabolism of a branched chain amino acid is a metabolic disorder involving the abnormal catabolism of a branched chain amino acid. In another embodiment, the disorder involving the catabolism of a branched chain amino acid is a disorder caused by the activation of mTor. In one embodiment, the disease or disorder is a maple syrup urine disorder (MSUD). In one embodiment, the branched chain amino acid is leucine, isoleucine, or valine. In one embodiment, the branched chain amino acid is leucine. In another embodiment, the branched chain amino acid is isoleucine. In another embodiment, the branched chain amino acid is valine. In another embodiment, the branched chain α-keto acid is α-ketoisocaproic acid (KIC). In another embodiment, the branched chain α-keto acid is α-ketoisovaleric acid (KIV). In another embodiment, the branched chain α-keto acid is α-keto-β-methylvaleric acid (KMV).

[0510] In some embodiments, the disclosure provides methods for reducing, ameliorating, or eliminating one or more symptom(s) associated with these diseases, including but not limited to neurological deficits, mental retardation, brain damage, brain oedema, blindness, branched chain α-keto acid acidosis, myelinization failure, hyperammonaemia, coma, developmental delay, neurological impairment, failure to thrive, ketoacidosis, seizure, ataxia, neurodegeneration, hypotonia, lactic acidosis, recurrent myoglobinuria, and/or liver failure. In some embodiments, the disease is secondary to other conditions, e.g., liver disease.

[0511] In certain embodiments, the bacterial cells disclosed herein are capable of catabolizing branched chain amino acid(s), e.g., leucine, in the diet of the subject in order to treat a disease associated with catabolism of a branched chain amino acid, e.g., MSUD. In these embodiments, the bacterial cells are delivered simultaneously with dietary protein. In another embodiment, the bacterial cells are delivered simultaneously with phenylbutyrate. In another embodiment, the bacterial cells are delivered simultaneously with a thiamine supplement. In some embodiments, the bacterial cells and dietary protein are delivered after a period of fasting or leucine-restricted dieting. In these embodiments, a patient suffering from a disorder involving the catabolism of a branched chain amino acid, e.g., MSUD, may be able to resume a substantially normal diet, or a diet that is less restrictive than a leucine-free diet. In some embodiments, the bacterial cells may be capable of catabolizing leucine from additional sources, e.g., the blood, in order to treat a disease associated with the catabolism of a branched chain amino acid, e.g., MSUD. In these embodiments, the bacterial cells need not be delivered simultaneously with dietary protein, and a leucine gradient is generated, e.g., from blood to gut, and the recombinant bacteria catabolize the branched chain amino acid, e.g., leucine, and reduce plasma levels of the branched chain amino acid, e.g., leucine.

[0512] The method may comprise preparing a pharmaceutical composition with at least one genetically engineered species, strain, or subtype of bacteria described herein, and administering the pharmaceutical composition to a subject in a therapeutically effective amount. In some embodiments, the bacterial cells disclosed herein are administered orally, e.g., in a liquid suspension. In some embodiments, the bacterial cells disclosed herein are lyophilized in a gel cap and administered orally. In some embodiments, the bacterial cells disclosed herein are administered via a feeding tube or gastric shunt. In some embodiments, the bacterial cells disclosed herein are administered rectally, e.g., by enema. In some embodiments, the genetically engineered bacteria are administered topically, intraintestinally, intrajejunally, intraduodenally, intraileally, and/or intracolically.

[0513] In certain embodiments, the administering the pharmaceutical composition described herein reduces branched chain amino acid levels in a subject. In some embodiments, the methods of the present disclosure reduce the branched chain amino acid levels, e.g., leucine levels, in a subject by at least about 10%, 20%, 25%, 30%, 40%, 50%, 60%, 70%, 75%, 80%, 85%, 90%, 95%, or more. In another embodiment, the methods of the present disclosure reduce the branched chain amino acid levels, e.g., leucine levels, in a subject by at least two-fold, three-fold, four-fold, five-fold, six-fold, seven-fold, eight-fold, nine-fold, or ten-fold. In some embodiments, reduction is measured by comparing the branched chain amino acid level in a subject before and after administration of the pharmaceutical composition. In one embodiment, the branched chain amino acid level is reduced in the gut of the subject. In another embodiment, the branched chain amino acid level is reduced in the blood of the subject. In another embodiment, the branched chain amino acid level is reduced in the plasma of the subject. In another embodiment, the branched chain amino acid level is reduced in the brain of the subject.

[0514] In one embodiment, the pharmaceutical composition described herein is administered to reduce branched chain amino acid levels in a subject to normal levels. In another embodiment, the pharmaceutical composition described herein is administered to reduce branched chain amino acid levels in a subject below normal levels to, for example, decrease the activation of mTor.

[0515] In certain embodiments, the pharmaceutical composition described herein is administered to reduce branched chain α-keto-acid levels in a subject. In some embodiments, the methods of the present disclosure reduce the branched chain α-keto-acid levels, in a subject by at least about 10%, 20%, 25%, 30%, 40%, 50%, 60%, 70%, 75%, 80%, 85%, 90%, 95%, or more as compared to levels in an untreated or control subject. In another embodiment, the methods of the present disclosure reduce the branched chain α-keto-acid levels, in a subject by at least two-fold, three-fold, four-fold, five-fold, six-fold, seven-fold, eight-fold, nine-fold, or ten-fold. In some embodiments, reduction is measured by comparing the branched chain α-keto-acid levels in a subject before and after administration of the pharmaceutical composition. In one embodiment, the branched chain α-keto-acid level is reduced in the gut of the subject. In another embodiment, the branched chain α-keto-acid level is reduced in the blood of the subject. In another embodiment, the branched chain α-keto-acid level is reduced in the plasma of the subject. In another embodiment, the branched chain α-keto-acid level is reduced in the brain of the subject.

[0516] In one embodiment, the pharmaceutical composition described herein is administered to reduce the branched chain α-keto-acid level in a subject to a normal level. In another embodiment, the pharmaceutical composition described herein is administered to reduce the branched chain α-keto-acid level in a subject below a normal level to, for example, decrease the activation of mTor.

[0517] In some embodiments, the method of treating the disorder involving the catabolism of a branched chain amino acid, e.g., MSUD, allows one or more symptoms of the condition or disorder to improve by at least about 10%, 20%, 30%, 40%, 50%, 60%, 70%, 80%, 90%, 95%, or more. In some embodiments, the method of treating the disorder involving the catabolism of a branched chain amino acid, e.g., MSUD, allows one or more symptoms of the condition or disorder to improve by at least about two-fold, three-fold, four-fold, five-fold, six-fold, seven-fold, eight-fold, nine-fold, or ten-fold.

[0518] Before, during, and after the administration of the pharmaceutical composition, branched chain amino acid levels, e.g., leucine levels, in the subject may be measured in a biological sample, such as blood, serum, plasma, urine, peritoneal fluid, cerebrospinal fluid, fecal matter, intestinal mucosal scrapings, a sample collected from a tissue, and/or a sample collected from the contents of one or more of the following: the stomach, duodenum, jejunum, ileum, cecum, colon, rectum, and anal canal. In some embodiments, the methods may include administration of the compositions disclosed herein to reduce levels of the branched chain amino acid, e.g., leucine. In some embodiments, the methods may include administration of the compositions disclosed herein to reduce the branched chain amino acid, e.g., leucine, to undetectable levels in a subject. In some embodiments, the methods may include administration of the compositions disclosed herein to reduce the branched chain amino acid, e.g., leucine, concentrations to undetectable levels, or to less than about 1%, 2%, 5%10%, 20%, 25%, 30%, 40%, 50%, 60%, 70%, 75%, 80%, 85%, 90%, or 95% of the subject's branched chain amino acid levels prior to treatment.

[0519] In some embodiments, the recombinant bacterial cells disclosed herein produce a branched chain amino acid catabolism enzyme, e.g., KivD, BCKD and/or other BCAA catabolism enzyme, BCAA transporter, BCAA binding protein, etc, under exogenous environmental conditions, such as the low-oxygen environment of the mammalian gut, to reduce levels of branched chain amino acids in the blood or plasma by at least about 1.5-fold, at least about 2-fold, at least about 3-fold, at least about 4-fold, at least about 5-fold, at least about 6-fold, at least about 7-fold, at least about 8-fold, at least about 9-fold, at least about 10-fold, at least about 15-fold, at least about 20-fold, at least about 30-fold, at least about 40-fold, or at least about 50-fold as compared to unmodified bacteria of the same subtype under the same conditions.

[0520] In one embodiment, the bacteria disclosed herein reduce plasma levels of the branched chain amino acid, e.g., leucine, will be reduced to less than 4 mg/dL. In one embodiment, the bacteria disclosed herein reduce plasma levels of the branched chain amino acid, e.g., leucine, will be reduced to less than 3.9 mg/dL. In one embodiment, the bacteria disclosed herein reduce plasma levels of the branched chain amino acid, e.g., leucine, will be reduced to less than 3.8 mg/dL, 3.7 mg/dL, 3.6 mg/dL, 3.5 mg/dL, 3.4 mg/dL, 3.3 mg/dL, 3.2 mg/dL, 3.1 mg/dL, 3.0 mg/dL, 2.9 mg/dL, 2.8 mg/dL, 2.7 mg/dL, 2.6 mg/dL, 2.5 mg/dL, 2.0 mg/dL, 1.75 mg/dL, 1.5 mg/dL, 1.0 mg/dL, or 0.5 mg/dL.

[0521] In one embodiment, the subject has plasma levels of at least 4 mg/dL prior to administration of the pharmaceutical composition disclosed herein. In another embodiment, the subject has plasma levels of at least 4.1 mg/dL, 4.2 mg/dL, 4.3 mg/dL, 4.4 mg/dL, 4.5 mg/dL, 4.75 mg/dL, 5.0 mg/dL, 5.5 mg/dL, 6 mg/dL, 7 mg/dL, 8 mg/dL, 9 mg/dL, or 10 mg/dL prior to administration of the pharmaceutical composition disclosed herein.

[0522] Certain unmodified bacteria will not have appreciable levels of branched chain amino acid, e.g., leucine, processing. In embodiments using genetically modified forms of these bacteria, processing of branched chain amino acids, e.g., leucine, will be appreciable under exogenous environmental conditions.

[0523] Branched chain amino acid levels, e.g., leucine levels, may be measured by methods known in the art, e.g., blood sampling and mass spectrometry. In some embodiments, branched chain amino acid catabolism enzyme expression is measured by methods known in the art. In another embodiment, branched chain amino acid catabolism enzyme activity is measured by methods known in the art to assess BCAA activity.

[0524] In certain embodiments, the recombinant bacteria are E. coli Nissle. The recombinant bacteria may be destroyed, e.g., by defense factors in the gut or blood serum (Sonnenborn et al., 2009) or by activation of a kill switch, several hours or days after administration. Thus, the pharmaceutical composition comprising the recombinant bacteria may be re-administered at a therapeutically effective dose and frequency. In alternate embodiments, the recombinant bacteria are not destroyed within hours or days after administration and may propagate and colonize the gut.

[0525] In one embodiments, the bacterial cells disclosed herein are administered to a subject once daily. In another embodiment, the bacterial cells disclosed herein are administered to a subject twice daily. In another embodiment, the bacterial cells disclosed herein are administered to a subject in combination with a meal. In another embodiment, the bacterial cells disclosed herein are administered to a subject prior to a meal. In another embodiment, the bacterial cells disclosed herein are administered to a subject after a meal. The dosage of the pharmaceutical composition and the frequency of administration may be selected based on the severity of the symptoms and the progression of the disease. The appropriate therapeutically effective dose and/or frequency of administration can be selected by a treating clinician.

[0526] The methods disclosed herein may comprise administration of a composition disclosed herein alone or in combination with one or more additional therapies, e.g., the phenylbutyrate, thiamine supplementation, and/or a low-branched chain amino acid, e.g., a low-leucine, diet. An important consideration in the selection of the one or more additional therapeutic agents is that the agent(s) should be compatible with the bacteria disclosed herein, e.g., the agent(s) must not interfere with or kill the bacteria. In some embodiments, the genetically engineered bacteria are administered in combination with a low protein diet. In some embodiments, administration of the genetically engineered bacteria provides increased tolerance, so that the patient can consume more protein.

[0527] The methods disclosed herein may further comprise isolating a plasma sample from the subject prior to administration of a composition disclosed herein and determining the level of the branched chain amino acid, e.g., leucine, or branched chain alpha-keto-acid in the sample. In some embodiments, the methods disclosed herein may further comprise isolating a plasma sample from the subject after to administration of a composition disclosed herein and determining the level of the branched chain amino acid, e.g., leucine, or branched chain alpha-keto-acid in the sample.

[0528] In one embodiment, the methods disclosed herein further comprise comparing the level of the branched chain amino acid or branched chain α-keto-acid in the plasma sample from the subject after administration of a composition disclosed herein to the subject to the plasma sample from the subject before administration of a composition disclosed herein to the subject. In one embodiment, a reduced level of the branched chain amino acid or branched chain alpha-keto-acid in the plasma sample from the subject after administration of a composition disclosed herein indicates that the plasma levels of the branched chain amino acid or branched chain alpha-keto-acid are decreased, thereby treating the disorder involving the catabolism of the branched chain amino acid in the subject. In one embodiment, the plasma level of the branched chain amino acid or branched chain α-keto-acid is decreased at least 10%, 20%, 30%, 40$, 50%, 60%, 70%, 80%, 90%, or 100% in the sample after administration of the pharmaceutical composition as compared to the plasma level in the sample before administration of the pharmaceutical composition. In another embodiment, the plasma level of the branched chain amino acid or branched chain α-keto-acid is decreased at least two-fold, three-fold, four-fold, or five-fold in the sample after administration of the pharmaceutical composition as compared to the plasma level in the sample before administration of the pharmaceutical composition.

[0529] In one embodiment, the methods disclosed herein further comprise comparing the level of the branched chain amino acid or branched chain α-keto-acid in the plasma sample from the subject after administration of a composition disclosed herein to a control level of the branched chain amino acid or branched chain alpha-keto-acid. In one embodiment, the control level of the branched chain amino acid is 4 mg/dL. In one embodiment, the subject is considered treated if the level of branched chain amino acid, e.g., leucine, in the plasma sample from the subject after administration of the pharmaceutical composition disclosed herein, is less than 4 mg/dL. In one embodiment, the subject is considered treated if the level of branched chain amino acid, e.g., leucine, in the plasma sample from the subject after administration of the pharmaceutical composition disclosed herein is less than 3.9, 3.8, 3.7, 3.6, 3.5, 3.4, 3.3, 3.2, 3.1, 3.0, 2.5, 2.0, 1.5, 1.0 or 0.5 mg/dL.

### EXEMPLIFICATION

[0530] The present disclosure is further illustrated by the following examples which should not be construed as limiting in any way. The contents of all cited references, including literature references, issued patents, and published patent applications, as cited throughout this application are hereby expressly incorporated herein by reference. It should further be understood that the contents of all the figures and tables attached hereto are also expressly incorporated herein by reference.

### Experimental Methods for all Examples

### 1-1. Design and Construction of LeuDH, KivD, and Adh Enzyme Libraries

[0531] Metagenomic Enzyme Discovery.

[0532] Machine-learning-based bioinformatics tools were used to identify enzyme candidates for each of the three desired activities (leucine dehydrogenase, 1.4.1.9; ketoisovalerate decarboxylase, 4.1.1.1; and alcohol dehydrogenase 1.1.1.1) in public sequence databases (SwissProt and TrEMBL, together known as UniProt). For LeuDH and Adh, sequence diversity was maximized using proprietary algorithms developed at Ginkgo. For KivD, a stratified sampling approach was used.

[0533] Rational Enzyme Design.

[0534] For LeuDH and Adh, molecular models of the enzyme-transition state complex were built using Rosetta software, and systematic mutations of the active site residues to each of the 20 amino acids were designed.

[0535] Library Synthesis.

[0536] DNA sequences for all LeuDH, KivD, and Adh enzymes were codon-optimized for expression in E. coli via Ginkgo-developed sequence design tools. Coding sequences were synthesized in an inducible E. coli expression vector under the control of the T7 promoter at Twist Bioscience.

### 1-2. High-Throughput In Vitro Enzyme Assays

[0537] Cell growth and enzyme preparation. Strains harboring library plasmids were transformed into an E. coli T7 expression host. 5 μL/well of thawed glycerol stocks were stamped into 500 μL/well of LB+100 ug/mL Carbenicillin (LB-Carb100) in half-height deepwell plates, which were sealed with AeraSeals. Samples were incubated at 37° C. and shaken at 1000 RPM in 80% humidity overnight. 50 μL/well of the resulting precultures were stamped into 450 μL/well of LB-Carb100+1 mM IPTG in half-height deepwell plates, which were sealed with AeraSeals. Samples were incubated at 30° C. and shaken at 1000 RPM in 80% humidity overnight. 250 μL/well of the resulting production cultures were stamped into deepwell plates containing 500 uL of phosphate buffered saline (PBS) and centrifuged for 10 minutes at 4000*G. Supernatant was removed and the resulting cell pellet was resuspended in 200 uL of BugBuster Protein Extraction Reagent+1 uL/mL purified Benzonase+1 uL/6 mL purified Lysozyme. Samples were incubated for 10 minutes at room temperature to generate the cell lysates used in in vitro enzyme assays.

[0538] LeuDH Activity Assay.

[0539] 10 uL of lysate was transferred to a half-area flat-bottom plate containing 90 uL/well assay buffer (20 mM amino acid [L-Leucine, L-Valine, or L-Isoleucine], 200 mM Glycine, 200 mM KCl, 0.4 mM NAD, pH 10.5). Optical measurements were taken on a plate reader, with absorbance readings taken at 340 nm for 10 minutes. The resulting kinetic data was used to resolve the rate of NAD+ reduction, a proxy for LeuDH activity.

[0540] KivD Activity Assay.

[0541] 10 uL of lysate was transferred to a half-area flat-bottom plate containing 90 uL/well assay buffer (100 mM PIPES-KOH, 100 mM Potassium glutamate, 1 mM Dithiothreitol, 0.4 mM NAD, 1.5 mM Thiamine pyrophosphate, 10 mM Magnesium glutamate, 20 mM ketoisocaproate (KIC), pH 7.5). A coupling enzyme was used to indirectly measure KivD activity on KIC. Optical absorbance measurements were taken over 10 minutes. The resulting kinetic data was used to determine KivD activity.

[0542] Adh Activity Assay.

[0543] 10 uL of lysate was transferred to a half-area flat-bottom plate containing 90 uL/well assay buffer (50 mM MOPS buffer, 0.4 mM NADH, and 30 mM isovaleraldehyde, pH 7.0). Optical absorbance measurements were taken on a plate reader at 340 nm for 10 minutes. The resulting kinetic data was used to resolve the rate of NADH oxidation, a proxy for ADH activity.

[0544] LeuDH Selectivity Assay.

[0545] To measure LeuDH selectivity (specific deamination of L-Leu in the presence of L-Ile and L-Val), lysate was diluted four-fold in lysis buffer, and 10 uL/well of the newly diluted lysate was stamped into 90 uL/well of a modified assay buffer from above, featuring 0.5 mM of each amino acid (L-leucine, L-isoleucine, L-valine), 200 mM Glycine, 200 mM Potassium chloride, and 4 mM NAD. The reaction was quenched at different timepoints and submitted for LC-MS quantification of leucine, isoleucine, and valine.

### 1-3. Design and Construction of Optimized BCAA Pathways

[0546] Based on their performance in the in vitro assay, six (6) LeuDH enzymes, three (3) KivD enzymes, and three (3) Adh enzymes were selected to build candidate optimized BCAA operons. For translational control of each enzyme, we generated 3 ribosome binding sites of differing strengths. These RBS-gene pairs were then assembled into a partial combinatorial library in Synlogic's pathway plasmid. All pathway operons maintained the gene order of Synlogic's prototype pathway (LeuDH-KivD-Adh) and the final BmQ gene from the parent pathway.

### 1-4. High-Throughput BCAA Pathway Screening

[0547] Cell Preparation.

[0548] BCAA pathway plasmids were transformed into the SYN469 chassis (ΔilvC, ΔleuE, lacZ::Ptet-livKHMGF) and plated on LB agar plates supplemented with 100 μg/ml carbenicillin to select for strains harboring operon plasmids. Up to 6 colonies were picked from each transformation, grown in LB media supplemented with 100 μg/ml carbenicillin and cryopreserved in 20% glycerol prior to screening. For screening, strains were inoculated from cryostocks into FM1 medium supplemented with 100 μg/ml carbenicillin and grown overnight at 37° C. to generate pre-cultures. Pre-cultures were back-diluted in to FM1 media supplemented with 100 μg/ml carbenicillin and grown at 37° C. for approximately 2-2.5 hours to OD600 of ˜1.5-2. Cultures were then induced at a final concentration of 100 μg/ml aTc and allowed to grow for 2.5 hours at 37° C. Cultures were harvested and cryopreserved in Cryopreservation Buffer in 96-well plates.

[0549] Pathway Screening.

[0550] Cells were thawed on ice and the OD₆₀₀ value of each culture plate was measured. The OD₆₀₀ value was averaged across each 96-well plate. The average OD₆₀₀ for each plate was then used to determine the dilution necessary to achieve a final OD₆₀₀ of 2 in 0.8 ml Assay Buffer without leucine. Following this dilution, the samples were centrifuged, and the supernatant was discarded. The resulting cell pellets were resuspended in 0.8 ml Assay Buffer without leucine. An equal volume of 2× Assay Buffer (8 mM leucine) was added to the samples for a final volume of 1.6 ml at an OD600 value of 1 to initiate the reaction. Plates were sealed with foil heat seals and incubated at 37° C. without shaking for 4 hours. Samples were collected at 0, 2 and 4 h intervals. Upon collection, samples were centrifuged to remove cells and supernatant was stored at 4° C. prior to analysis by LC-MS, LC-MS-UV and/or GC-MS.

### 1-5. Metabolite Analysis

[0551] Leu, Val, and Ile were measured using LC-MS in a multiplexed QQQ method with linearity from 1 μg/ml-1000 μg/ml. Keto isocaproate (KIC) and isovaleraldehyde was detected by derivatizing assay samples with 2-hydrazinoquinoline. The KIC and isovaleraldehyde derivatives were detected using LC-MS-UV. IPA was measured in assay samples using GC-MS.

### 1-6. In Vitro Assay

[0552] Materials prepared from flasks or fermenters were thawed on ice, and cell density was measured by light absorption at 600 nm (OD₆₀₀). OD₆₀₀ of 1.0 was assumed to be equal to 10⁹ cells/mL in this method. A volume was calculated to target 1 mL of 2×10⁹ cells/mL cell resuspension and the cells were transferred into a 96-deep well plate and washed once with cold PBS. After centrifugation (4000 rpm, 4° C., 10 min), the PBS was discarded, and the cell pellets were then resuspended in 1 mL of 1×M9+50 mM MOPS+0.5% glucose (MMG) buffer. Eight hundred (800) μL of each sample was transferred into a new 96-deep well plate and 800 μL of MMG containing 16 mM leucine was added, mixed well by pipetting. A sample (200 μL) assigned as time zero was collected at this moment. The plate was then covered by a breathable membrane and moved to anaerobic chamber to incubate at 37° C. Samples were also collected at 2 h and 4 h during incubation in the anaerobic chamber. The samples were centrifuged for 10 min at 4000 rpm at 4° C. immediately after collection. 100 μL of the supernatant was transferred into a new 96-well plate and stored at −80° C. for future analysis. For different testing purposes, various amounts of branched chain amino acid(s) could be added to the reaction.

### 1-7. Flask Cell Preparation

[0553] The culture was inoculated into 4 mL of 2×YT medium containing proper antibiotics in a culture tube incubated at 37° C. with shaking (250 RPM) overnight. The next day, 500 μL of the overnight culture was transferred into 50 mL of FM1 medium containing proper antibiotics in a 125 mL baffled flask. The flasks were incubated for 2 hours at 37° C. with shaking at 250 RPM. Inducer was added after this 2-hour incubation for induction of pathway enzymes. The flasks remained shaking for 4 hours after induction. Cultures were then transferred into a 50 mL tube and centrifuged for 16 min at 5000 rpm at 4° C. The cell pellet was washed once with cold PBS and then resuspended into 800 μL of cold buffer (1×PBS+15% glycerol) and aliquoted into PCR tubes to store at −80° C.

### 1-8. Fermentation Cell Preparation

[0554] A frozen master cell bank scrape was used to inoculate 50 mL fermentation media in a 500 mL ultrayield flask, and grown to stationary phase overnight at 350 RPM, 37° C., resulting in a final density of 30-40 OD₆₀₀. AMBR250 vessels were prepared containing 200 mL (unless volume of feed was too high, then reduced to 100 mL) of media, with either 25 g/L glucose or 40 g/L glycerol and appropriate antibiotics, and equilibrated at 37° C., 1500 RPM, 100 mL/min air flow, and pH 7 (pH control by ammonium hydroxide). They were inoculated to approximately 0.15 OD₆₀₀ from the overnight seed culture and grown to varying OD₆₀₀ levels before addition of varying levels of inducing agent, tetracycline, and other supplementations (see experimental section below). Cultures were then grown to a final density target of 30 OD₆₀₀ where possible, maintaining dissolved oxygen levels at 60% using agitation up to 3500 RPM and then up to 80% substituted oxygen in the gas (100 mL/min fixed total gas flow) via cascade control. This material was spun down at 2500×g at 4° C. in 1 L centrifuge bottles, then resuspended in 100 mM K-phosphate pH 7.5 buffer with 15% (vol/vol) glycerol to ⅕th the volume, or approximately 1×10¹¹ cells/mL, and then frozen for storage at −80° C.

### 1-9. In Vitro Gastrointestinal Simulation of Strain Activity

[0555] To characterize the viability and metabolic activity of engineered bacterial strains, and to predict their function in vivo, an in vitro gastrointestinal simulation (IVS) model was designed to simulate key aspects of the human gastrointestinal tract, including oxygen concentration, gastric and pancreatic enzymes, and bile. The IVS model is comprised of a series of incubations in 96-well microplate format designed to simulate stomach, small intestine, and colonic conditions. The stomach and small intestinal portions of the IVS model were adapted from Minekus et al., 2014 (3). To study the activity of engineered strains designed for the treatment of MSUD, only the simulated stomach was considered.

[0556] Briefly, frozen aliquots of bacterial cells were first thawed at room temperature and resuspended in 0.077 M sodium bicarbonate buffer at 5.0×10⁹ CFU/mL. This solution was then mixed with equal parts of simulated gastric fluid (SGF; Minekus et al., 2014) containing 5 mM leucine and incubated for 2 hours at 37° C. with shaking in a Coy microaerobic chamber. The atmosphere within the microaerobic chamber was initially calibrated to 7% oxygen and gradually decreased to 2% oxygen over 2 hours. The cell density in SGF is 2.5×10⁹ CFU/mL. For testing the mixture of BCAA, 5 mM of each BCAA was added into the system.

[0557] To determine strain activity over time, SGF aliquots were collected periodically and centrifuged at 4000 rpm for 5 mins using a tabletop centrifuge. Cell free supernatants were collected and stored at −20° C. prior to mass spectrometry analysis of leucine and isopentanol concentration.

1-10. Efficacy of Engineered E. coli Nissle in iMSUD Mice

[0558] The iMSUD mouse model was generated as previously described (3) and breeder pairs sent to Charles River Laboratories' (CRL) Genetically Engineered Models (GEMS) for colony maintenance. Male and female mice aged 21-45 days were shipped to the Synlogic facility and allowed to acclimate for a minimum of 4 days on a mixture of branched chain amino acid free diet (Dyets, 510081) and 18% protein diet (Envigo, TD.2018.15) diet before study initiation. Mice were assigned to study groups according to date of birth and body weight and orally administered vehicle (15% glycerol in PBS), SYN1980 (8.9×10⁹ CFU) or SYN5941(8.9×10⁹ CFU) twice a day (BID) for a total of 4 days. Male and female mice were switched to a 70% high-protein diet and provided hydrogel (Envigo, TD.06723) on days 2 and 3, respectively, while receiving vehicle or bacteria BID. On the morning of day 5, mice received 66.7 mg peptone followed by vehicle or bacteria 30 minutes later. Two hours post bacteria dose, submandibular bleedings were performed, and plasma isolated for measurement of branch-chain amino acids (BCAA) leucine, isoleucine and valine levels by mass spectrometry.

1-11. Efficacy of Engineered E. coli Nissle in Healthy Non-Human Primates

[0559] Twelve monkeys were studied. Each study included 2 conditions (vehicle, SYN1980 or SYN5941). A total of 3 studies were performed and combined so each group would include n=10-12. Animals were allowed a 1 week break between dosing to allow strains to clear from the intestine between studies.

[0560] On the morning of the study, each monkey was removed from its cage and an oral gavage tube was inserted before 7.8 mL of vehicle (15% glycerol in PBS) or bacteria (1×1012 CFUs) was administered to each animal, followed by 5 mL of 0.36 M sodium bicarbonate, 14 mL of 500 g/L peptone and 5 mL water flush. Animals were then returned to their cages and blood was collected at 0, 0.5, 1, 2, 4 and 6 hours post dosing. Plasma was isolated and stored at −70° C. for analysis of BCAAs by mass spectrometry.

### 1-12. Analysis of Branched Chain Amino Acids by LC-MS-MS

[0561] Leucine, Isoleucine, and Valine were quantitated in bacterial supernatant, plasma, and urine by liquid chromatography coupled to tandem mass spectrometry (LC-MS/MS) using either an Ultimate 3000 UHPLC-TSQ Quantum or a Vanquish UHPLC-TSQ Altis system. Samples were extracted with 9 parts 2:1 acetonitrile: water containing 1 ug/mL leucine-d3 as an internal standard, vortexed, and centrifuged. Supernatants were diluted with 9 parts 0.1% formic acid and analyzed concurrently with standards processed as above from 0.8 to 1000 ug/mL. Samples were separated on a Phenominex Synergi 4 um Hydro-RP 80A, 75×2 mm using a 0.1% formic acid (A), 0.1% formic acid/acetonitrile (B) at 0.3 mL/min and 50° C. After a 2 uL injection and an initial 5% B hold from 0 to 0.5 minutes, analytes were gradient eluted from 5 to 90% B over 0.5 to 1.5 minutes followed by high organic wash and aqueous equilibration steps. Analytes were detected using Selected Reacting Monitoring (SRM) of compound specific collision induced fragments in electrospray positive ion mode (leucine: 132>86, isoleucine: 132>69, Valine: 118>72, leucine-d3: 135>89). SRM chromatograms were integrated and the unknown/internal standard peak area ratios were used to calculate concentrations against the standard curve.

### 1-13. Analysis of Isopentanol by GC-MS

[0562] Isopentanol was quantitated in bacterial supernatant by gas chromatography—mass spectrometry (GC-MS) using an Agilent 7890B-5977B system. Samples were extracted with 2 parts ethyl acetate containing 100 ug/mL isopentanol-d4 as an internal standard, vortexed, and centrifuged. The upper organic layer was removed and analyzed concurrently with standards from 4 to 1000 mg/mL processed as above. Samples or standards, 1 uL injection (split 10:1, inlet at 250 C), were separated on a RESTEK Rxi-35Sil MS, 30 m×0.25 mmID, 0.25 umdf at 1 mL/min helium. After a 5-minute hold at 35° C., a temperature gradient from 35 to 310° C. over 5 minutes was used to elute the analytes. Compound were detected by the Selected Ion Monitoring (SIM) of specific positive fragment ions produced by electron ionization (isopentanol: 55.1, isopentanol-d4: 59.1). SIM chromatograms were integrated, and the unknown/internal standard peak area ratios were used to calculate concentrations against the standard curve.

### Example 1. Generation of Various Recombinant Bacterial Strains

[0563] Table 10 lists all the bacterial strains used in this application. Escherichia coli Nissle 1917 (EcN), designated as SYN001 here, was purchased from the German Collection of Microorganisms and Cell Cultures (DSMZ Braunschweig, E. coli DSM 6601). The procedures of generating recombinant bacteria (including SYN094, SYN469 and SYN1980) starting from the wild type strain SYN001 were fully disclosed in Examples 1-4 and others of International Application No. PCT/US2016/032565, the entire contents of which are incorporated herein by reference. Existing vectors described below including the operon pSC101-Pₜₑₜ-leuDH-kivd-adh2-brnQ-ampR was used to generate SYN1980 and disclosed in Example 19 and others of International Application No. PCT/US2016/032565. For ease of reference, pSC101-Pₜₑₜ-leuDH-kivd-adh2-brnQ-ampR is referred herein as “Original Operon”. Recombinant strains corresponding to ID 5-14 of Table 10 were newly generated by the present application.

[0564] SYN001 with streptomycin resistance was obtained by streaking ˜10¹¹ cells of SYN001 on LB plate containing 300 ng/mL streptomycin and taking the single colony formed, designated as SYN094. The deletion of the ilvC and leuE gene was done by P1 transduction from the corresponding BW25113 strains and cured of antibiotic cassette afterwards. The correct colonies were verified by PCR and stored for future usage. For insertion of the lacZ::Ptet-livKHPMF cassette, the proper DNA fragment was generated by overlapping PCR and integrated into the chromosome by lambda red recombineering method. Colonies were selected on LB agar containing proper antibiotics (30 μg/mL chloramphenicol) and correct recombination events were verified by PCR. A verified colony was saved for future operations. Chromosomal insertions of extra brnQ cassette into the EcN genome were carried out using the well-characterized lambda red recombineering approach as well. For this insertion, (1) a pKD3- or pKD4-based plasmid containing ˜1,000 bp of 5′ and 3′ EcN genome homology for recombination was built, followed by (2) insertion of the target fragment into the plasmid by isothermal assembly (HiFI DNA Assembly Master Mix, NEB), (3) amplification of the insertion fragment from the plasmid by PCR (including EcN homology regions and antibiotic resistance cassette, Q5 High-Fidelity Master Mix, NEB), (4) recombineering of the insertion fragment by electroporation via pKD46 and subsequent pKD46 removal, and (5) the removal of antibiotic resistance cassettes via pCP20 and subsequent pCP20 removal.

[0565] A plasmid harboring the BCAA-consuming operon under the control of various promoters was either synthesized or PCR amplified from corresponding vectors containing an ampicillin resistance gene, a low copy number origin of replication (pSC101) and under the regulatory control of the Pₜₑₜ promoter. Various promoter systems such as P_{cl857}, P_{lacI/fnr}, P_{BAD} or P_{cmt} promoters were PCR-amplified from existing vectors and subcloned into target plasmids by Gibson assembly method. These plasmids were used to electroporate SYN001, SYN469 or other parental host strains with extra integrated brnQ cassette into the malE/K or malP/T locus. After the electroporation (Eporator, Eppendorf, 1.8-kV pulse, 1-mm gap length electro-cuvettes) the transformed cells were selected as colonies on LB agar (Sigma, L2897) containing proper antibiotics.

TABLE 10

| | | | | Induction |
|---|---|---|---|---|
| ID | Strain # | Genotype | Description* | Activity |
| 1 | SYN001 | Control bacterium | N/A | N/A |
| 2 | SYN094 | SYN001 with strep | Control bacterium with strep resistance | N/A |
| | | resistance | | |
| 3 | SYN469 | SYN001, ΔilvC, ΔleuE, | Bacterium with deleted BCAA | N/A |
| | | lacZ::Pₜₑₜ-livKHPMF | synthesis enzyme IlvC, leucine | |
| | | | exporter LeuE, and insertion of BCAA | |
| | | | importer LivKHPMF under the control | |
| | | | of Pₜₑₜ promoter | |
| 4 | SYN1980 | SYN001, ΔilvC, ΔleuE, | Bacterium with plasmid containing | aTc |
| | | lacZ::Pₜₑₜ-livKHPMF, | original BCAA consumption operon | |
| | | pSC101-Pₜₑₜ-leuDH- | under the control of Pₜₑₜ promoter | |
| | | kivd-adh2-brnQ-ampR | | |
| 5 | SYN5721- | SYN001, ΔilvC, ΔleuE, | Bacterium with plasmid containing | aTc |
| | SYN5744 | lacZ::Pₜₑₜ-livKHPMF, | optimized BCAA consumption operon | |
| | | pSC101-Pₜₑₜ-optimized | under the control of Ptet promoter | |
| | | operon-brnQ-ampR | | |
| 6 | SYN5941- | SYN001, pSC101-Pₜₑₜ- | Bacterium with plasmid containing | aTc |
| | SYN5943 | optimized operon- | optimized BCAA consumption operon | |
| | | brnQ-ampR | under the control of Ptet promoter | |
| 7 | SYN5944- | SYN001, ΔilvC, ΔleuE, | Bacterium with plasmid containing | aTc, |
| | SYN5946 | lacZ::Pₜₑₜ-livKHPMF, | optimized BCAA consumption operon | anaerobic, |
| | | malP/T::P_{lacI/fnr}-brnQ, | under the control of Ptet promoter and | IPTG |
| | | pSC101-Pₜₑₜ-optimized | extra integrated BCAA importer BrnQ | |
| | | operon-brnQ-ampR | under the control of P_{lacI/fnr} promoter | |
| 8 | SYN5947- | SYN001, ΔilvC, ΔleuE, | Bacterium with plasmid containing | aTc, |
| | SYN5949 | lacZ::Pₜₑₜ-livKHPMF, | optimized BCAA consumption operon | cumate |
| | | malE/K::P_{cmt}-brnQ, | under the control of Ptet promoter and | |
| | | pSC101-Pₜₑₜ-optmized | extra integrated BCAA importer BrnQ | |
| | | operon-brnQ-ampR | under the control of P_{cmt} promoter | |
| 9 | SYN5950- | SYN001, ΔilvC, ΔleuE, | Bacterium with plasmid containing | aTc, |
| | SYN5952 | lacZ::Pₜₑₜ-livKHPMF, | optimized BCAA consumption operon | cumate |
| | | malE/K::P_{cmt}-brnQ, | under the control of Ptet promoter and | |
| | | malP/T::P_{cmt}-brnQ, | two extra integrated BCAA importer | |
| | | pSC101-Pₜₑₜ-optimized | BrnQ under the control of P_{cmt} promoter | |
| | | operon-brnQ-ampR | | |
| 10 | SYN6034 | SYN001, pSC101-Pₜₑₜ- | Bacterium with plasmid containing | aTc |
| | | leuDH-kivd-adh2- | original BCAA consumption operon | |
| | | brnQ-ampR | under the control of Pₜₑₜ promoter | |
| 11 | SYN6035 | SYN001, pSC101-P_{cmt}- | Bacterium with plasmid containing | cumate |
| | | optimized operon- | optimized BCAA consumption operon | |
| | | brnQ-ampR | under the control of P_{cmt} promoter | |
| 12 | SYN6036 | SYN001, pSC101- | Bacterium with plasmid containing | IPTG, |
| | | P_{lacI/fnr}-optimized | optimized BCAA consumption operon | anaerobic |
| | | operon-brnQ-ampR | under the control of P_{lacI/fnr} promoter | |
| 13 | SYN6037 | SYN001, pSC101- | Bacterium with plasmid containing | heat |
| | | P_{cI857}-optimized | optimized BCAA consumption operon | |
| | | operon-brnQ-ampR | under the control of P_{cI857} promoter | |
| 14 | SYN6038 | SYN001, pSC101- | Bacterium with plasmid containing | arabinose |
| | | P_{BAD}-optimized operon- | optimized BCAA consumption operon | |
| | | brnQ-ampR | under the control of P_{BAD} promoter | |

*Original BCAA consumption operon refers to pSC101-Pₜₑₜ-leuDH-kivd-adh2-brnQ-ampR. Optimized BCAA consumption operon refers to the operons generated in the present application.

### Example 2. Design and Synthesis of LeuDH, KivD, and Adh Enzyme Libraries

[0566] The metagenomic enzyme discovery and rational enzyme design described above were used to design a library for each enzyme family (LeuDH, KivD, and Adh) to identify LeuDH, KivD, and Adh pathway enzymes (i) with increased activity than the parent pathway enzymes from SYN1980: Bacillus cereus LeuDH, Lactococcus lactis KivD, and Saccharomyces cerevisiae ADH2, respectively; and (ii) with increased specificity for leucine (Leu) relative to valine (Val) and isoleucine (Ile). Table 11 summarizes the enzyme library composition. For each enzyme, a metagenomic library of >1000 enzymes was designed to sample the full metagenomic sequence space available in sequence databases and depicted in FIG. 1. For LeuDH and Adh, additional designs were constructed using rational design based on available structural data for the B. cereus LeuDH and S. cerevisiae Adh enzymes. Enzyme sequences for all libraries were optimized for expression in E. coli, synthesized in an inducible E. coli expression vector, and transformed into E. coli for high throughput screening.

TABLE 11

| | | | | | | Total |
|---|---|---|---|---|---|---|
| Library | Bacteria | Fungi | Animal | Plant | Rational | Designs |
| LeuDH | 1129 | 11 | 23 | 12 | 270 | 1445 |
| KivD | 783 | 508 | 1 | 4 | 0 | 1296 |
| Adh | 654 | 273 | 128 | 122 | 140 | 1317 |

### Example 3. Characterization of Pathway Enzyme Libraries

[0567] To screen the 3×˜1300-member enzyme libraries, high-throughput methods were developed to screen for LeuDH, KivD, and Adh enzyme activities in E. coli cell lysates. In brief, strains were cultivated in 96-deepwell plates to induce protein production, with positive and negative control strains included in each plate. Cells were lysed, and enzyme activity was measured in cell lysates using enzyme-specific spectrophotometric assays described above in the method section. Enzyme assays were executed on the fully automated robotic workcell known as ATLAS.

[0568] For each enzyme family, the full library (˜1300 members each) was measured in biological duplicate, and hits were selected based on the highest activity in a single replicate for each enzyme. This method of hit selection reduced the impact of false negative activity measurements for a given replicate. For each library, 55-220 enzymes were selected as primary hits. To increase the confidence in the hit selected from the primary screen and establish enzyme ranking based on activity, the primary hits were re-screened in a secondary screen with additional replication (8 technical replicates).

[0569] Leucine Dehydrogenase (leuDH)

[0570] A total of 1378 LeuDH enzymes were first screened for the ability to deaminate leucine. An initial round of screening identified 220 enzymes with activity similar to or better than the parent LeuDH enzyme from B. subtilis. These primary hits were further analyzed in a secondary screen for validation of LeuDH enzyme hits (FIG. 2). In the secondary screen, LeuDH enzymes with up to a 1.8-fold increase in LeuDH activity on Leu were validated.

[0571] To determine if any of the primary LeuDH hits exhibited increased specificity for Leu over Val and Ile, all 220 primary hits were also screened for activity on Val and Ile. Specificity was measured as the ratio of activity on Leu to the activity on Ile or Val. As shown in FIG. 3, enzymes exhibited up to ˜2.7-fold preference for Leu over Val, and up to a 5-fold preference for Leu over Ile. By comparing specificity for Leu/Ile to Leu/Val, hits were identified with increased specificity for Leu relative to both Leu and Val (FIG. 4), as compared with the control B. cereus LeuDH from the prototype pathway SYN1980.

[0572] Ketoisovalerate Decarboxylase (kivD)

[0573] A total of 1248 KivD enzymes were screened for the decarboxylase activity on ketoisocaproate. An initial round of screening identified 55 enzymes with higher activity than the control KivD enzyme from S. aureus, which did not exhibit activity above greater than the background lysate decarboxylase activity in this assay and was equated to the non-zero measurable background activity. These primary KivD hits were further analyzed in a secondary screen (FIG. 5). In the secondary screen, more than 40 KivD enzymes were identified with at least 6- to 8-fold increase in KivD activity relative to the background lysate activity.

[0574] Alcohol Dehydrogenase (adh)

[0575] A total of 1215 Adh enzymes were screened for the ability to reduce isovaleraldehyde to isopentanol. An initial round of screening identified 55 enzymes with higher activity than the parent ADH2 enzyme from S. cerevisiae, which did not exhibit activity greater than the background lysate alcohol dehydrogenase activity in this assay and was equated to the non-zero measurable background activity. Because activity of the ADH2 enzyme for S. cerevisiae was indistinguishable from the background activity of the lysate, an Equus caballus Adh was used as a positive control for the screen. These primary Adh hits were further analyzed in a secondary screen (FIG. 6). In the secondary screen, 5 Adh enzymes were identified with at least 20-fold increase in Adh activity relative to the background lysate activity.

### Example 4. Selectivity of Top LeuDH Candidate Enzymes for Optimized BCAA Consumption

[0576] In an attempt to better predict the performance of the top LeuDH hits with regard to mixed-substrates pools, the selectivity of LeuDH enzymes for Leu (i.e. the preference of LeuDH for Leu when Leu, Val, and Ile are all present in the reaction mixture) were measured. A total of 21 LeuDH enzymes were screened in cell lysate assays similar to the HTP screen, except that the reaction mixture contained Leu, Val, and Ile at 1:1:1 molar ratio. Rate of Leu, Val, and Ile disappearance was monitored in the reaction mixture. FIG. 7 reports consumption of Leu, Ile, and Val within the reaction mixture for each LeuDH enzyme. At least 10 LeuDH enzymes showed improved preference for Leu over Val and Ile when compared to the parent B. subtilis LeuDH. For nearly all LeuDH enzymes, least preference was shown for valine.

### Example 5. Pathway Enzyme Hit Selection, Operon Assembly and Operon Screening for Optimized BCAA Consumption

### Materials and Methods

### Cell Preparation

[0577] Branched-chain amino acid (BCAA) pathway operon plasmids were transformed into E. coli Nissle strain 1917, which was purchased from the German Collection of Microorganisms and Cell Cultures (DSMZ Braunschweig, E. coli DSM 6601). Transformed cells were thawed on ice and cell density was measured by light absorption at 600 nm (OD600). OD600 of 1.0 was assumed to be equal to 109 cells/mL in this method. A volume was calculated to target 1 mL of 2×109 cells/mL cell resuspension, and the cells were transferred into a 96-deep well plate and washed once with cold PBS. After centrifugation (4000 rpm, 4° C., 10 min), the PBS was discarded, and the cell pellets were then resuspended in 1 mL of 1×M9+50 mM MOPS+0.5% glucose (MMG) buffer. Eight hundred (800) μL of each sample was transferred into a new 96-deep well plate and 800 μL of MMG containing 16 mM leucine was added, mixed well by pipetting. A sample (200 μL) assigned as time zero was collected at this moment. The plate was then covered by a breathable membrane and moved to an anaerobic chamber to incubate at 37° C. Samples were also collected at 2 hours and 4 hours during incubation in the anaerobic chamber. The samples were centrifuged for 10 minutes at 4000 rpm at 4° C. immediately after collection. 100 μL of the supernatant was transferred into a new 96-well plate and stored at −80° C. for future analysis.

### Leucine Activity Assay

[0578] Leucine was quantitated in bacterial supernatant by liquid chromatography coupled to tandem mass spectrometry (LC-MS/MS) using either an Ultimate 3000 UHPLC-TSQ Quantum or a Vanquish UHPLC-TSQ Altis system. Samples were extracted with 9 parts 2:1 acetonitrile:water containing 1 pug/mL leucine-d3 as an internal standard, vortexed, and centrifuged. Supernatants were diluted with 9 parts 0.1% formic acid and analyzed concurrently with standards processed as above from 0.8 to 1000 pug/mL. Samples were separated on a Phenominex Synergi 4 um Hydro-RP 80A, 75×2 mm using a 0.1% formic acid (A), 0.1% formic acid/acetonitrile (B) at 0.3 mL/min and 50 degrees C. After a 2 uμL injection and an initial 5% B hold from 0 to 0.5 minutes, analytes were gradient eluted from 5 to 90% B over 0.5 to 1.5 minutes followed by high organic wash and aqueous equilibration steps. Analytes were detected using Selected Reacting Monitoring (SRM) of compound specific collision induced fragments in electrospray positive ion mode (leucine: 132>86, isoleucine: leucine-d3: 135>89). SRM chromatograms were integrated, and the unknown/internal standard peak area ratios were used to calculate concentrations against the standard curve.

[0579] To improve the overall Leu consumption of the BCAA pathway, multiple enzymes were selected for each step that demonstrated superior performance relative to the B. cereus LeuDH enzyme. For LeuDH, 6 hits were selected based on two criteria: (1) enzyme activity on Leu and (2) specificity for Leu relative to Val and Ile. Because LeuDH selectivity analysis was conducted in parallel to operon assembly, the selectivity data set did not factor into LeuDH selection. For KivD and ADH, 3 hits were selected for each enzyme family based on in vitro enzyme activity. In total, 12 enzymes were advanced to the final operon design.

[0580] To balance the flux of the Leu-consuming pathway, enzyme identity and enzyme level for each enzyme in the Leu-consuming pathway were varied. Three (3) ribosome binding sites (RBSs) were selected for each pathway enzyme candidate. These RBS-enzyme pairs were then assembled into a partial combinatorial library of 462 pathways, and the gene order was held constant (LeuDH-KivD-Adh), as shown in FIG. 8. Pathways were synthesized and cloned into a MSUD pathway backbone encoding a branched chain amino acid transporter (BrnQ). The final pathways were composed of four-gene operons (LeuDH-KivD-Adh-BrnQ) in which the LeuDH, KivD, and Adh enzymes and their RBSs were varied while the BrnQ RBS and coding sequence is held constant.

[0581] The operon library was screened in HTP to identify optimal pathway designs for Leu consumption in SYN469 (ΔilvC, ΔleuE, lacZ::Ptet-livKHMGF). Of the 462 operons designed, 383 were successfully synthesized and 254 were successfully transformed into SYN469 for screening. All pathway strains were cultured and screened for Leu consumption in 96-well plates. For plate-to-plate standardization, each plate included control strains which harbored the prototype pathway SYN1980 or versions lacking LeuDH (SYN1980 ΔLeuDH) or BrnQ (SYN1980 ΔBrnQ). As shown in FIG. 9, multiple pathways were identified that Leu consumption and isopentanol production each occurred at a faster rate than the prototype pathway SYN1980. Strains were ranked based on Leu consumption, and 24 strains were validated in the flask-based model described above in the method section. Analysis of the enzyme composition of the top 24 pathway operons showed that 4 of 6 LeuDHs and all 3 Adh enzymes were represented in the top 24 operons. However, 23 of the 24 operons contained the same KivD, supporting a correlation between this KivD enzyme and the overall pathway activity.

### Results

[0582] The top Leu consuming operons identified through HTP screening were transformed into E. coli Nissle 1917 (and labeled as strain 5941, 5942 and 5943) and compared to the prototype strain 1980. Strain 5941 contains the LeuDH enzyme of Cetobacterium ceti, the KivD enzyme of Erwinia iniecta, and the Adh enzyme of Alcanivoriax dieselolei. Strain 5942 has the LeuDH enzyme of Cetobacterium ceti, the KivD enzyme of Erwinia iniecta, and the Adh enzyme of Rhizobiales bacterium NRL2. Strain 5943 has LeuDH enzyme of Cetobacterium ceti, the KivD enzyme of Erwinia iniecta, and the Adh enzyme of Rhizobiales bacterium NRL2. The operons further contain BrnQ of E. coli. The prototype strain contains Bacillus cereus LeuDH, Lactococcus lactis KivD, Saccharomyces cerevisiae ADH2, as well as E. coli BrnQ.

[0583] Samples from the top Leu consuming operons and the prototype strain were analyzed for Leu consumption (FIG. 20). The top Leu consuming operon-containing strains (5941, 5942 and 5943) were found to consume Leu at a significantly faster rate than the prototype strain (1980).

### Example 6. Metabolomics Analysis of Top Pathways for Optimized BCAA Consumption

[0584] The top 10 Leu consuming strains identified through HTP screening described above in the method section shown in FIG. 9 were selected for targeted metabolomic analysis of pathway intermediates. In brief, strains harboring optimized or controlled plasmids were grown and induced in a flask-based model in biological triplicate. Cells were harvested, normalized individually by OD₆₀₀, and prepared for the Leu-consumption assay. The assay was initiated by addition of cells to the Leu assay buffer, and reactions were sampled over time and preserved for analysis. Samples were analyzed for Leu, ketoisocaproate (KIC), and isovaleraldehyde (FIG. 10). Isopentanol measurements were not collected for this experiment. Of the 10 selected pathways, 9 consumed Leu at a faster rate than the prototype strain (SYN1980) and the SYN1980 ΔBrnQ variant (i.e. SYN1992). The 9 better performing strains had drastically reduced levels of KIC when compared the control strains, indicating that a KivD bottleneck was relieved through the pathway optimization campaign, providing further evidence that KivD is a bottle neck in the overall pathway. Of the top 9 strains, t214235 exhibited the fastest rate of Leu consumption and a downward IVA trend over time.

### Example 7. In Vitro Activity Validation for BCAA Consuming Strains Generated from Host Strain SYN469

[0585] Plasmids containing optimized operons were transformed into SYN469, resulting in strains SYN5721 to SYN5744. The in vitro leucine consumption assay was performed to assess their activity using SYN1980 as a control. As shown in FIG. 11, all new strains demonstrated improved activity in vitro as compared to SYN1980. Top hits such as SYN5721, SYN5722 and SYN5723 were selected for further testing.

[0586] These selected strains were tested using BCAA mixture as substrates in vitro. The goal here was to understand the substrate specificity when all three branched chain amino acids were present simultaneously. The leucine:isoleucine:valine ratio was 2:1:1, corresponding to the ratio analyzed previously for in vivo GI content. Strains showed some specificity advantage towards leucine versus valine, but not isoleucine (Table 12).

TABLE 12

| | SYN- | SYN- | SYN- | SYN- | SYN- | SYN- |
|---|---|---|---|---|---|---|
| | 1980 | 5721 | 5722 | 5723 | 5725 | 5729 |
| Val | 0.27 | 0.49 | 0.46 | 0.59 | 0.64 | 0.40 |
| (2 mM) | | | | | | |
| Ile | 0.31 | 0.82 | 0.78 | 0.59 | 0.69 | 0.67 |
| (2 mM) | | | | | | |
| Leu | 0.59 | 1.51 | 1.43 | 1.40 | 1.18 | 1.25 |
| (4 mM) | | | | | | |
| BCAA | 1.17 | 2.82 | 2.66 | 2.58 | 2.51 | 2.32 |

### Example 8. Host Strain Screening Study and Promoter Screening Study to Screen for Optimized BCAA Consuming Strains

[0587] In addition to various modifications existed in SYN469 (ΔilvC, ΔleuE, lacZ::Ptet-livKHMGF), which was used for the construction of SYN1980 and SYN5721-SYN5744. A panel of new strains was built using the most active operons and different host strains. In these set of host strains, either modifications were removed such as using the wild-type strain SYN001 or extra modifications were introduced such as extra copy(s) of BCAA transporter BmQ. The in vitro leucine consumption activity was measured. SYN5941 demonstrated the highest leucine consumption rate under this test condition (FIG. 12).

[0588] A panel of selected promoters were chosen to drive the optimized operon and tested for in vitro leucine consumption. The operon in SYN1980 was used as a control. The host strain was SYN001 for testing the new promoters. All the clinical candidate strain compatible promoters-FNRS, P_{cmt}, P_{cl857}, and P_{BAD}-showed reasonable in vitro leucine consumption activity, though lower than SYN5941 harvesting the Pₜₑₜ driven operon (FIG. 13 and Table 13).

TABLE 13

| | | | | | IPTG | Heat | |
|---|---|---|---|---|---|---|---|
| Inducer | aTc | aTc | aTc | Cumate | (fnr) | (37° C.) | arabinose |
| Final Strain # | SYN1980 | SYN6034 | SYN5941 | SYN6035 | SYN6036 | SYN6037 | SYN6038 |
| Activity (Leu) | 0.48 | 0.29 | 3.08 | 1.54 | 1.20 | 0.91 | 0.89 |
| (umol/10⁹ cells/h) | | | | | | | |
| Host | SYN469 | SYN001 | SYN001 | SYN001 | SYN001 | SYN001 | SYN001 |
| Operon source | 1980 | 1980 | 5721 | 5721 | 5721 | 5721 | 5721 |

### Example 9. In Vitro Activity Study for Optimized BCAA Consuming Strain SYN 5941 in a Fermentation Scale-up Process

[0589] Various parameters were tested such as, but not limited to, carbon source, feeding rate, temperature, time of induction and inducer concentration. Using SYN5941, FM1 media with glucose and 6× anhydrotetracycline (aTc) concentration (600 μg/mL) was chosen as the growth condition and cells were harvested 4 hours post induction from the fermenter for cryopreservation. A greater-than-ten-fold improvement in in vitro leucine consumption was observed using the optimized strain SYN5941 with newly developed fermentation process (Table 14). As shown in Table 15, SYN5941 exhibited a much higher leucine consumption rate than SYN1980.

TABLE 14

| | Carbon | Induction | aTc (1x = | | |
|---|---|---|---|---|---|
| Media | source | OD | 100 μg/mL) | Feed | Temp |
| FM1 | 25 g/L glucose | 1.5, 10, 20 | 0.1, 1, 3, 6, 10X | BCAAs (hi/lo rates) | Shift to 30° C. |
| | | | | | mid-induction |
| FM5 | None | 1.5, 10 | 1X | YE + glycerol, | NA |
| | | | | YE + glucose, | |
| | | | | BCAA + glycerol | |
| FM2 | 40 g/L glycerol, | 1.5, 10 | 1X | NA | Shift to 30° C. |
| | 25 g/L glucose | | | | mid-induction |
| FM4 | 25 g/L | 1.5 | 1X | BCAAs (hi/lo rates) | NA |
| | 5glucose | | | | |

FM1: 25 g/L YE, K-Phosphate buffer, MgSO₄, trace metals, ammonium phosphate, iron chloride.
FM2: 24 g/L YE, 12 g/L soytone, K-Phosphate buffer.
FM5: 8 g/L YE, K-Phosphate buffer, MgSO₄, trace metals, ammonium phosphate, iron chloride.
FM4: K-phosphate buffer, MgSO₄, trace metals, citric acid, ammonium sulfate, iron citrate.

TABLE 15

| STRAIN# | SYN5941 | SYN1980 |
|---|---|---|
| Final Batch# | SYN5941BR12-13 | SYN1980BR16-17 |
| Activity (μmol/10\hat{ }9 CFU/h) | 2.69 | 0.17 |

### Example 10. In Vitro Activity Study for Optimized BCAA Consuming Strain SYN 5941 in a Gastrointestinal Simulation System

[0590] The in vitro activity of the optimized strain, SYN5941, was compared to the that of the original variant, SYN1980, using the in vitro gastrointestinal simulation (IVS) model described above in the method section. FIG. 14A displays representative data concerning leucine consumption (left) and isopentanol production (right) by these two strains during two hours' incubation in simulated gastric fluid with bicarbonate buffering. The oxygen concentration in this assay was decreased gradually from 7% to 4% oxygen, mimicking the low oxygen conditions of the human upper gastrointestinal tract. SYN5941 displayed increased leucine consumption and isopentanol production in IVS, as compared to SYN1980. Notably, this increased leucine consumption was not attributable to fermentation process changes, as SYN1980 prepared with the optimized process demonstrated comparable activity to the SYN1980 prepared with the base process. The consumption specificity towards leucine only or leucine, isoleucine and valine mixture as the substrate(s) were tested in the IVS system as well. As demonstrated in FIG. 14B, SYN5941 had the highest activity towards leucine when leucine, isoleucine and valine were present in equal amount of 5 mM. The overall leucine consumption was also similar to the reaction system when only leucine was present.

[0591] Leucine consumption rates and isopentanol production rates were calculated based on the data points collected between time zero and the first 2 hours. As shown in Table 16, the rate of leucine consumption was greater for SYN5941 than for SYN1980 (0.85±0.04 versus 0.25±0.12 μmol/10⁹ CFU/hr). The same trend can be said for isopentanol production (0.45±0.01 versus 0.13±0.02 μmol/10⁹ CFU/hr).

TABLE 16

| | | Leu | | Isopentanol | |
|---|---|---|---|---|---|
| | MSUD | Consumption Rate | | Production Rate | |
| | Fermentation | (μmol/10⁹ CFU/h) | | (μmol/10⁹ CFU/hr) | |
| Strain | Process | Mean | StDev | Mean | StDev |
| SYN5941 | Optimized | 0.85 | 0.04 | 0.45 | 0.01 |
| SYN1980 | Optimized | 0.16 | 0.03 | 0.04 | 0.00 |
| SYN1980 | Original | 0.25 | 0.12 | 0.13 | 0.02 |
| EcN | NA | 0.02 | 0.03 | 0.00 | 0.00 |

### Example 11. In Vitro Characterization of SYN5941

[0592] The in vitro activity of the optimized strain, SYN5941, was characterized in various conditions. FIG. 15 depicts leucine consumption rate of SYN5941 in increase leucine concentration (FIG. 15A), increasing pH (FIG. 15B), and increasing oxygen concentration (FIG. 15C). Various substrate concentrations (0, 0.63, 1.25, 5, 10, 15, or 20 mM leucine) were added into the reaction media and the leucine consumption rate was measured for each concentration, respectively. The leucine concentration was measured by HPLC at different time points to obtain the rates. The leucine consumption rates were plotted against the substrate concentration and fitted by a hyperbolic curve. SYN5941 was considered as one enzyme molecule, then the corresponding values of the Ymax and the X value to reach ½ Ymax can be obtained to use as Vmax and Km for SYN5941 during catalysis of leucine degradation. Similar assays were done a fixed substrate concentration (10 mM) but varied the media pH (3, 4, 5, 6, or 7) and oxygen level (0%, 7%, or 21%) to investigate the pH and oxygen dependence. The optimal strain activity is at pH 7. However, it is relatively insensitive to oxygen level which is consistent with the original reason to choose this redox neutral pathway.

### Example 12. In Vivo Efficacy Study for Optimized BCAA Consuming Strain SYN5941 in iMSUD Mice

[0593] Two independent studies were performed to compare the efficacy of SYN5941 against SYN1980 in a mouse model of MSUD (iMSUD) provided with a high-protein diet. In the first study (FIG. 16), the leucine levels in the high-protein diet were increased to 1647±265.8 μM in iMSUD males and 1165±151.9 μM in iMSUD females. SYN5941 lowered leucine in males to 843.4±113.4 μM, which was more significant than SYN1980 (FIG. 16A). The high protein diet also increased the levels of isoleucine and valine in males and females but similar to leucine, a more significant effect was observed with SYN5941 in males (FIG. 16B-C).

[0594] In the second study (FIG. 17), the leucine levels in the high-protein diet were further increased to 2428±485.1 μM in iMSUD males and 1626±150.1 μM in iMSUD females. In contrast to the first study, neither SYN5941 nor SYN1980 significantly lowered leucine levels in either males or females (FIG. 17A). The high protein diet also increased the levels of isoleucine and valine in both males and females but similar to leucine, the bacteria had no significant effect on the levels of these amino acids (FIG. 17B-C).

### Example 13. In Vivo Efficacy Study for Optimized BCAA Consuming Strain SYN5941 in Healthy Non-Human Primates

[0595] To assess the efficacy of SYN5941 and SYN1980 in healthy non-human primates, monkeys received a single dose of vehicle or bacteria concomitantly with the meat digest peptone. Branched chain amino acid levels leucine, isoleucine and valine peaked approximately 1 hour post-peptone administration in vehicle-treated animals to 99.7±16.5 μM, 47.7±9.3 μM and 123.2±21.4 μM, respectively (FIG. 18A-18C). SYN5941 lowered the levels of leucine more significantly than SYN1908 (FIG. 18).

[0596] Table 17 shows that SYN5941 exhibited significantly higher leucine consumption activities than SYN1980 in all three systems demonstrated above in Examples 9, 10 and 13.

TABLE 17

| Strain | In vitro activity | IVS | NHP |
|---|---|---|---|
| SYN1980* | 0.17 | 0.16 | 327.3 |
| SYN5941** | 2.69 | 0.85 | 133.5 |
| UNIT | (μmol/10⁹ CFU/h) | (μmol/10⁹ CFU/h) | (area under curve) |
| Fold of | 15.8 | 5.3 | 59.2% decrease |
| improvement | | | |

*Original operon in strain SYN1980: leuDH (Bacillus cereus) - kivD (Lactococcus lactis) - adh (Saccharomyces cerevisiae) Original chassis for strain SYN1980: SYN469 = SYN001, ΔilvC, ΔleuE, lacZ::Ptet-livKHMGF
**Optimized operon in new strain SYN5941: leuDH (Cetobacterium Ceti) - kivD (Erwinia iniecta) - adh (Alcanivoriax dieselolei) Optimized chassis for new strain SYN5941: SYN094 = SYN001, strpR

### Example 14. Molar Balance Closure of the Isopentanol Pathway

[0597] The performance and molar balance closure of the isopentanol pathway in SYN5941 was assessed in Ambr15 bioreactors. The reactors were filled to 17 mL with M9 media with 0.5% glucose, 10 mM Leu, 10 mM Val, and 5 mM Ile. Conditions were controlled with 0% dissolved oxygen and pH at 7.0. Activated biomass was inoculated to an OD600 of 1, and samples of the supernatant were taken over time to monitor metabolite concentrations.

[0598] The extracellular concentration profiles of pathway intermediates are shown in the Figure below. Over the course of 180 minutes, 4.1±0.3 mM of Leucine was consumed and 4.4±0.5 mM of isopentanol accumulated in the media. The keto-acid (2-oxoisocaproate) and aldehyde (isovaleraldehyde) were not observed in the supernatant. Thus, the flux through the pathway is balanced and accounted for. This is also shown by the conservation of total moles of the pathway intermediates (FIG. 21).

### Methods—Fermentation

[0599] The assay was performed in an AMBR15f, microbioreactor system from Sartorius. The vessels were filled with 17 mls of 1×m9 media salts, supplemented with 2.0 mm MgSO4, 0.1 mM CaCl, 5% glucose, 10 mM L-leucine, 5 mM L-isoleucine, and 10 mM valine. The vessels were filled 18 hrs prior to inoculation, to enable both the pH and DO optodes to hydrate. The temperature in the reactors was kept at 37c, the pH was maintained at 7 using 2N NaOH, and the dissolved oxygen was kept at 0 using a 0.14 vvm N2 flow rate. The agitation was set to 500 RPM to enable good mixing throughout the experiment. The bioreactors were inoculated to an OD600 of 1, from activated biomass supplied by Synlogic. The bioreactors were sampled at 0, 30, 90, 150, and 180 minutes post inoculation. Samples were immediately centrifuged at 15000×g for 30 secs in a microcentrifuge and the supernatant was removed for analysis. Supernatants were stored at −20° C. until ready for analysis.

### Methods—Analytics

[0600] Analytics were developed for two methods, one method towards liquid chromatography mass spectrometry (LCMS) for the quantification of leucine (Leu), ketoisocaproate acid (Leu acid), and isovaleraldehyde (Leu aldehyde). The method (data not shown), was also validated and used for quantification of valine and isoleucine (and there respected acid and aldehyde products). While the second method developed for gas chromatography mass spectrometry (GCMS) for the quantification of isopentanol (Leu alcohol). Thus, completing the pathway for mass balance for SYN5941. The GCMS method (data not shown), was also validated and used for quantification of valine and isoleucine alcohol products.

[0601] LCMS analysis was performed on a Thermo Ultimate 3000 UPLC system with a Thermo Q-Exactive quadrupole-orbitrap mass detector and a Thermo Accucore PFP column (2.1×100 mm, 2.6 um packing) using the following elution solvents: A=0.1% formic acid and 0.1% TFA in water; B=0.1% formic acid in acetonitrile. The gradient was at 0.5 mL/min of 1% B in A for 60 seconds, followed by a linear ramp from 1% to 40% B in A over 270 seconds. The column is then flushed with 95% B in A for 60 seconds, and re-equilibrated with 1% B in A for 180 seconds. MS acquisition was from 0.8 to 5.3 minutes.

[0602] Column effluent is introduced into the mass spectrometer via a standard Thermo ESI source with positive mode ionization at +3800V, vaporizer temperature of 400° C., and ion transfer tube temperature of 375° C. Thermo reports gas flow rates in arbitrary units probably approximating L/min at STP. Set points were: sheath gas, 60; aux gas, 30; sweep gas, 1. To increase data acquisition rate, orbitrap resolution was set to 17,500. Quadrupole resolution was 1 m/z.

[0603] This method also derivatizes both aldehydes and keto acids, improving the stability of those analytes. Numerous derivatizing agents were explored, and it was found that 2-(Dimethylamino)ethylhydrazine in methanol resulted in the best sensitivity in positive mode. A buffer of 0.5M acetic acid and 0.5M sodium acetate in methanol was used for the quantification of LEU ACID and LEU ALDEHYDE, while also measuring non-derivatized LEU.

[0604] GC-MS analysis was performed on an Agilent GCMS/MSD with a Gerstel autosampler, using a J&W DB-WAX GC Column (15 m) and chloroform as the extraction solvent. Front injector was set at 250° C. and a flow rate of 1 mL/min. The oven temperature held at 40° C. for 1 minute, followed by a ramp to 130° C. (15° C./min), and then ramped up to 200° C. (65° C./min). Ms acquisition scan window was at 40-150 mz, with the MS source and MS quad at 250 C and 200° C. respectively.

[0605] Finally to facilitate high throughput and automation, a Gerstel autosampler was used to inject the extracted bottom chloroform layer in a 96 well plate format with the aqueous ambr15 culture matrix on top acting as an overlay to prevent product evaporation. To account for any other potential alcohol product evaporation, 2-heptanol was added to the chloroform as an internal.

The application's sequence listing, which the Patent Office published only in electronic form, follows.

SEQUENCE LISTING (168 sequences)

SEQ ID NO: 1 - DNA, 10193 bp, Artificial Sequence
  Description of Artificial Sequence: Synthetic polynucleotide
gcgaaaaatcaataaggaggcaacaagatgtgcgaaaaacatcttaatcatgctaaggaggttttctaatgaacatcttcaagaaaatggaggaatttaattatgaacaactggtctacttctacgacagcgaaacggaactcaaaggtattacctgtatacacaacacaactttagggccggcattgggcggtacccgcctttggaactataactctgaggaagatgccgttgaagacgtaatccgtctggctcggggcatgacttacaaagcggcttgcgccggtctgaatctgggcggcggtaaaaccgtgctgatcggtgatgctaaaaagattaaatcagagtcctacttccgtggactggggcgctacgttcagtcgctgaacggcagatatatcaccgcggaagacgtaaatacttctacgaaggatatggcatacgttgctatggaaactgactatgtggtaggcctgggaggtaaatccggcaaccctagtccagttactgcttacggtgcatttatgggtatcaaagcggcgctgatgaaaaaatttgaggatagctctattgaaggccgaaccttcgcagtgcagggtgctgggcagacgggttactatcttatcgattacctcctaggcaacaacaagttcaaagaaaaggctaaaaagatttacttcaccgaaattaacgagagctatatcgagcgtatgaacaaagaacatccggaagttgaatttatttccccggacaaaatctactcgctggaagtagacgtcttcgtgccctgcgccctgggcaaaatcgttaatgacaaaactatcgatgaatttaagtgtccgatcatcgcaggtactgcaaacaacgtactggaaagggaagcgcacggcaacatgcttaaagaacgtggcattctttacgccccggactatgtgatcaatgctggtgggctgatcaacgtttaccacgagctgaacggttacaataaagagaacgctattctggaagtggaattaatttatgatcgcctactggaaatattcaacatcgctgattctctgaacatcagcaccaatatcgctgccaacgagttcgcggaaaaacgtatcaagcaaattaagtccttgaaaaacaacttcattaaacgctaagtcaataaaggcatataaaaggaggttaataacatgaaagttaaagtaaaacatcttaatcatgcacaggagactttctaatgtcgacgacaaccgttggtgactacttgctgtatcgcttaaacgaaatcggcattgagcacctcttcggagtgccaggtgattacaatctgcaatttctggatcatgtaatcgaccaccctcagctgacttgggtcggctgcactaacgaacttaacgctgcctacgcagctgatggttatgcgcgttgtcgtccggctgcggcactgctgaccaccttcggggttggcgaactgagcgctattaatggcatcgcaggttcctacgcggagtatctgccggtaatacatatcgttggtgcaccgagtctatcagcccagcagcagggcgacctgattcaccactctcttggcgaaggtgatttttccagcttcctgaggatgtcccaaccggtgtctgttgcgcaggctgctctgactcctgataacgcatgcaaggaaatcgaccgcgtactggcggaagtcctcattcagcgtcgtcccggctacctgctgctgtctaccgacgtggctgctgcgccggcggctctgccacaaagcactctttctttgccgaccgccccggatcatcgcgcagttctggctgctttcagcgacgctgctgagcagatgctggctcaggccaaaagcgtctctctactggcggactttctggctgatcgtttcggtgttactcgagcactggccgcgtggcttcagcaggttccgctaccgcacgccactctgttaatgggtaaaggcgttctgagtgaacagcaaccagggttcgtgggtacctacgctggtgcggcatctatcgattcgacgcgtggcgcaatcgaagaagctggggtaattatcggagtgggagttagattttccgacactatcacagcaggcttctcgcagcagatcgacgcccgccgttttatagacattcaacccttcttctctcgtattggcgatcgccagtttgatcacttgccgatgcaggctgccgtcgcagccctgcatcaactgtgtcttcgttatcagcagcagtggtctatcaccgctcctagcccgcctgcactgccgccggctgctggtagcgagctgtcccagaacgcattctggcaggcgatgcagaacttcatccgccctggggacctgttggtggccgaccaaggtactgcggcgttcggcgcagcggcgctgcgcttaccgcagaattgccagctgcttgtgcagccgctgtggggctcaatcggttacagtctgccggccacctttggtgctcagacggcagatacagagcgtcgtgtaatcctaatcattggcgatggttcagcgcaattaactattcaggaactttccagtatgatgcgtgacggcttgaaacctatcatctttctcctgaacaacaacggttacaccgttgaacgggcgattcacggcgcggagcaacgttataacgatatcgctgcttggaattggacccaactgccccaggcgctgagtgttcattgcccagcgcagagctggcgagtcgttgaaacggtgcagctgaccgacgtaatgaaagtcatcgctgcttctccgcgtctgagcttggtagaagttgttctgcctgcaatggatgtcccaccgctgctgcaagcagtgagtgccgctctgaaccagcgcaactcctcttaagaccagaggtaaggaggtaacaaccatgcgagtgttgaagaaacatcttaatcatgcaggggagggtttctaatgcagacggcgttcttgtataagccaggtcacgaaaacttagtgcgctcggagatcccgatacctaaagctgggcgtggcgaagtcgttctggaaattaaagccgctggcatgtgccattccgatctgcacgttctcgacggtggaatccccctgccgggtcaatttgtaatgggccatgaaatcgttggtactattcacgagatcggccaggacgtgaccggtttcaaacagggcgatctgtacgcagtccacggcccgaatccgtgtggtatttgcaccctgtgcagagaaggatttgataacgactgcactacagtggcgaaaaccggtcaatggttcggactgggtcttgacggcggctaccagaagtatatccgtatcccgaacgtaaggtctatcgttaaagttccagaaggtgtttcagctgaggcagctgcgagctgtactgatgcagtactgaccccgtaccgtgcactaaaacaggctggcgccagcaactctactcgggtactgattctgggtctgggtggcttaggtctgaatgcccttaaactggctaagaccttcggcagttacgtttacgcatctgacctgaaaccttctgcgcgtgaagctgctaaggccgctggggcggatgaagtgctggagtccctgcccgaagacccgctgggtgttgatatcgtgttagacgtcgttggcgtgcagagcaccttcaacctcgctcaaaaacacgttggcccgcgtggcatcattgtacctgtaggcctggcatccccacagctttcgtttaacctaacggatctggcgctccgcgaaattcgtgttcagggcactttttggggcacgagcaatgagctggctgaatgtctgcgcctgtgccagctgggcctgatcaacccgaaatatactgtggtgcctcttgaagaagcgccgaaatatatggaagcaatggctcatgggaaagtagaaggtcgtatcgttttccacccgtaagaaggagatatacatatgacccatcaattaagatcgcgcgatatcatcgctctgggctttatgacatttgcgttgttcgtcggcgcaggtaacattattttccctccaatggtcggcttgcaggcaggcgaacacgtctggactgcggcattcggcttcctcattactgccgttggcctaccggtattaacggtagtggcgctggcaaaagttggcggcggtgttgacagtctcagcacgccaattggtaaagtcgctggcgtactgctggcaacagtttgttacctggcggtggggccgctttttgctacgccgcgtacagctaccgtttcttttgaagtgggcattgcgccgctgacgggtgattccgcgctgccgctgtttatttacagcctggtctatttcgctatcgttattctggtttcgctctatccgggcaagctgctggataccgtgggcaacttccttgcgccgctgaaaattatcgcgctggtcatcctgtctgttgccgcaattatctggccggcgggttctatcagtacggcgactgaggcttatcaaaacgctgcgttttctaacggcttcgtcaacggctatctgaccatggatacgctgggcgcaatggtgtttggtatcgttattgttaacgcggcgcgttctcgtggcgttaccgaagcgcgtctgctgacccgttataccgtctgggctggcctgatggcgggtgttggtctgactctgctgtacctggcgctgttccgtctgggttcagacagcgcgtcgctggtcgatcagtctgcaaacggtgcggcgatcctgcatgcttacgttcagcatacctttggcggcggcggtagcttcctgctggcggcgttaatcttcatcgcctgcctggtcacggcggttggcctgacctgtgcttgtgcagaattcttcgcccagtacgtaccgctctcttatcgtacgctggtgtttatcctcggcggcttctcgatggtggtgtctaacctcggcttgagccagctgattcagatctctgtaccggtgctgaccgccatttatccgccgtgtatcgcactggttgtattaagttttacacgctcatggtggcataattcgtcccgcgtgattgctccgccgatgtttatcagcctgctttttggtattctcgacgggatcaaggcatctgcattcagcgatatcttaccgtcctgggcgcagcgtttaccgctggccgaacaaggtctggcgtggttaatgccaacagtggtgatggtggttctggccattatctgggatcgtgcggcaggtcgtcaggtgacctccagcgctcactaatacgcatggcatggatgaccgatggtagtgtgggctctccccatgcgagagtagggaactgccaggcatcaaataaaacgaaaggctcagtcgaaagactgggcctttcgttttatctgttgtttgtcggtgaacgctctcctgagtaggacaaatccgccgggagcggatttgaacgttgcgaagcaacggcccggagggtggcgggcaggacgcccgccataaactgccaggcatcaaattaagcagaaggccatcctgacggatggcctttttgcgtggccagtgccaagcttgcatgcgtgccagctgcattaatgaagaaatcatgctggaagaataacagctcactcaaaggcggtagtacgggttttgctgcccgcaaacgggctgttctggtgttgctagtttgttatcagaatcgcagatccggcttcagccggtttgccggctgaaagcgctatttcttccagaattgccatgattttttccccacgggaggcgtcactggctcccgtgttgtcggcagctttgattcgataagcagcatcgcctgtttcaggctgtctatgtgtgactgttgagctgtaacaagttgtctcaggtgttcaatttcatgttctagttgctttgttttactggtttcacctgttctattaggtgttacatgctgttcatctgttacattgtcgatctgttcatggtgaacagctttgaatgcaccaaaaactcgtaaaagctctgatgtatctatcttttttacaccgttttcatctgtgcatatggacagttttccctttgatatgtaacggtgaacagttgttctacttttgtttgttagtcttgatgcttcactgatagatacaagagccataagaacctcagatccttccgtatttagccagtatgttctctagtgtggttcgttgtttttgcgtgagccatgagaacgaaccattgagatcatacttactttgcatgtcactcaaaaattttgcctcaaaactggtgagctgaatttttgcagttaaagcatcgtgtagtgtttttcttagtccgttatgtaggtaggaatctgatgtaatggttgttggtattttgtcaccattcatttttatctggttgttctcaagttcggttacgagatccatttgtctatctagttcaacttggaaaatcaacgtatcagtcgggcggcctcgcttatcaaccaccaatttcatattgctgtaagtgtttaaatctttacttattggtttcaaaacccattggttaagccttttaaactcatggtagttattttcaagcattaacatgaacttaaattcatcaaggctaatctctatatttgccttgtgagttttcttttgtgttagttcttttaataaccactcataaatcctcatagagtatttgttttcaaaagacttaacatgttccagattatattttatgaatttttttaactggaaaagataaggcaatatctcttcactaaaaactaattctaatttttcgcttgagaacttggcatagtttgtccactggaaaatctcaaagcctttaaccaaaggattcctgatttccacagttctcgtcatcagctctctggttgctttagctaatacaccataagcattttccctactgatgttcatcatctgagcgtattggttataagtgaacgataccgtccgttctttccttgtagggttttcaatcgtggggttgagtagtgccacacagcataaaattagcttggtttcatgctccgttaagtcatagcgactaatcgctagttcatttgctttgaaaacaactaattcagacatacatctcaattggtctaggtgattttaatcactataccaattgagatgggctagtcaatgataattactagtccttttcctttgagttgtgggtatctgtaaattctgctagacctttgctggaaaacttgtaaattctgctagaccctctgtaaattccgctagacctttgtgtgttttttttgtttatattcaagtggttataatttatagaataaagaaagaataaaaaaagataaaaagaatagatcccagccctgtgtataactcactactttagtcagttccgcagtattacaaaaggatgtcgcaaacgctgtttgctcctctacaaaacagaccttaaaaccctaaaggcttaagtagcaccctcgcaagctcgggcaaatcgctgaatattccttttgtctccgaccatcaggcacctgagtcgctgtctttttcgtgacattcagttcgctgcgctcacggctctggcagtgaatgggggtaaatggcactacaggcgccttttatggattcatgcaaggaaactacccataatacaagaaaagcccgtcacgggcttctcagggcgttttatggcgggtctgctatgtggtgctatctgactttttgctgttcagcagttcctgccctctgattttccagtctgaccacttcggattatcccgtgacaggtcattcagactggctaatgcacccagtaaggcagcggtatcatcaacaggcttacccgtcttactgtcttttctacggggtctgacgctcagtggaacgaaaactcacgttaagggattttggtcatgagattatcaaaaaggatcttcacctagatccttttaaattaaaaatgaagttttaaatcaatctaaagtatatatgagtaaacttggtctgacagttaccaatgcttaatcagtgaggcacctatctcagcgatctgtctatttcgttcatccatagttgcctgactccccgtcgtgtagataactacgatacgggagggcttaccatctggccccagtgctgcaatgataccgcgagaaccacgctcaccggctccagatttatcagcaataaaccagccagccggaagggccgagcgcagaagtggtcctgcaactttatccgcctccatccagtctattaattgttgccgggaagctagagtaagtagttcgccagttaatagtttgcgcaacgttgttgccattgctacaggcatcgtggtgtcacgctcgtcgtttggtatggcttcattcagctccggttcccaacgatcaaggcgagttacatgatcccccatgttgtgcaaaaaagcggttagctccttcggtcctccgatcgttgtcagaagtaagttggccgcagtgttatcactcatggttatggcagcactgcataattctcttactgtcatgccatccgtaagatgcttttctgtgactggtgagtactcaaccaagtcattctgagaatagtgtatgcggcgaccgagttgctcttgcccggcgtcaatacgggataataccgcgccacatagcagaactttaaaagtgctcatcattggaaaacgttcttcggggcgaaaactctcaaggatcttaccgctgttgagatccagttcgatgtaacccactcgtgcacccaactgatcttcagcatcttttactttcaccagcgtttctgggtgagcaaaaacaggaaggcaaaatgccgcaaaaaagggaataagggcgacacggaaatgttgaatactcatactcttcctttttcaatattattgaagcatttatcagggttattgtctcatgagcggatacatatttgaatgtatttagaaaaataaacaaataggggttccgcgcacatttccccgaaaagtgccacctgacgtctaagaaaccattattatcatgacattaacctataaaaataggcgtatcacgaggccctttcgtctcgcgcgtttcggtgatgacggtgaaaacctctgacacatgcagctcccggagacggtcacagcttgtctgtaagcggatgccgggagcagacaagcccgtcagggcgcgtcagcgggtgttggcgggtgtcggggctggcttaactatgcggcatcagagcagattgtactgagagtgcaccatatgcggtgtgaaataccgcacagatgcgtaaggagaaaataccgcatcaggcgccattcgccattcaggctgcgcaactgttgggaagggcgatcggtgcgggcctcttcgctattacgccagctggcgaaagggggatgtgctgcaaggcgattaagttgggtaacgccagggttttcccagtcacgacgttgtaaaacgacggccagtgaattcgttaagacccactttcacatttaagttgtttttctaatccgcatatgatcaattcaaggccgaataagaaggctggctctgcaccttggtgatcaaataattcgatagcttgtcgtaataatggcggcatactatcagtagtaggtgtttccctttcttctttagcgacttgatgctcttgatcttccaatacgcaacctaaagtaaaatgccccacagcgctgagtgcatataatgcattctctagtgaaaaaccttgttggcataaaaaggctaattgattttcgagagtttcatactgtttttctgtaggccgtgtacctaaatgtacttttgctccatcgcgatgacttagtaaagcacatctaaaacttttagcgttattacgtaaaaaatcttgccagctttccccttctaaagggcaaaagtgagtatggtgcctatctaacatctcaatggctaaggcgtcgagcaaagcccgcttattttttacatgccaatacaatgtaggctgctctacacctagcttctgggcgagtttacgggttgttaaaccttcgattccgacctcattaagcagctctaatgcgctgttaatcactttacttttatctaatctagacatcattaattcctaatttttgttgacactctatcattgatagagttattttaccactccctatcagtgatagagaaaagtga

SEQ ID NO: 2 - DNA, 10250 bp, Artificial Sequence
  Description of Artificial Sequence: Synthetic polynucleotide
gcgaaaaatcaataaggaggcaacaagatgtgcgaaaaacatcttaatcatgctaaggaggttttctaatgaacatcttcaagaaaatggaggaatttaattatgaacaactggtctacttctacgacagcgaaacggaactcaaaggtattacctgtatacacaacacaactttagggccggcattgggcggtacccgcctttggaactataactctgaggaagatgccgttgaagacgtaatccgtctggctcggggcatgacttacaaagcggcttgcgccggtctgaatctgggcggcggtaaaaccgtgctgatcggtgatgctaaaaagattaaatcagagtcctacttccgtggactggggcgctacgttcagtcgctgaacggcagatatatcaccgcggaagacgtaaatacttctacgaaggatatggcatacgttgctatggaaactgactatgtggtaggcctgggaggtaaatccggcaaccctagtccagttactgcttacggtgcatttatgggtatcaaagcggcgctgatgaaaaaatttgaggatagctctattgaaggccgaaccttcgcagtgcagggtgctgggcagacgggttactatcttatcgattacctcctaggcaacaacaagttcaaagaaaaggctaaaaagatttacttcaccgaaattaacgagagctatatcgagcgtatgaacaaagaacatccggaagttgaatttatttccccggacaaaatctactcgctggaagtagacgtcttcgtgccctgcgccctgggcaaaatcgttaatgacaaaactatcgatgaatttaagtgtccgatcatcgcaggtactgcaaacaacgtactggaaagggaagcgcacggcaacatgcttaaagaacgtggcattctttacgccccggactatgtgatcaatgctggtgggctgatcaacgtttaccacgagctgaacggttacaataaagagaacgctattctggaagtggaattaatttatgatcgcctactggaaatattcaacatcgctgattctctgaacatcagcaccaatatcgctgccaacgagttcgcggaaaaacgtatcaagcaaattaagtccttgaaaaacaacttcattaaacgctaagtcaataaaggcatataaaaggaggttaataacatgaaagttaaagtaaaacatcttaatcatgcacaggagactttctaatgtcgacgacaaccgttggtgactacttgctgtatcgcttaaacgaaatcggcattgagcacctcttcggagtgccaggtgattacaatctgcaatttctggatcatgtaatcgaccaccctcagctgacttgggtcggctgcactaacgaacttaacgctgcctacgcagctgatggttatgcgcgttgtcgtccggctgcggcactgctgaccaccttcggggttggcgaactgagcgctattaatggcatcgcaggttcctacgcggagtatctgccggtaatacatatcgttggtgcaccgagtctatcagcccagcagcagggcgacctgattcaccactctcttggcgaaggtgatttttccagcttcctgaggatgtcccaaccggtgtctgttgcgcaggctgctctgactcctgataacgcatgcaaggaaatcgaccgcgtactggcggaagtcctcattcagcgtcgtcccggctacctgctgctgtctaccgacgtggctgctgcgccggcggctctgccacaaagcactctttctttgccgaccgccccggatcatcgcgcagttctggctgctttcagcgacgctgctgagcagatgctggctcaggccaaaagcgtctctctactggcggactttctggctgatcgtttcggtgttactcgagcactggccgcgtggcttcagcaggttccgctaccgcacgccactctgttaatgggtaaaggcgttctgagtgaacagcaaccagggttcgtgggtacctacgctggtgcggcatctatcgattcgacgcgtggcgcaatcgaagaagctggggtaattatcggagtgggagttagattttccgacactatcacagcaggcttctcgcagcagatcgacgcccgccgttttatagacattcaacccttcttctctcgtattggcgatcgccagtttgatcacttgccgatgcaggctgccgtcgcagccctgcatcaactgtgtcttcgttatcagcagcagtggtctatcaccgctcctagcccgcctgcactgccgccggctgctggtagcgagctgtcccagaacgcattctggcaggcgatgcagaacttcatccgccctggggacctgttggtggccgaccaaggtactgcggcgttcggcgcagcggcgctgcgcttaccgcagaattgccagctgcttgtgcagccgctgtggggctcaatcggttacagtctgccggccacctttggtgctcagacggcagatacagagcgtcgtgtaatcctaatcattggcgatggttcagcgcaattaactattcaggaactttccagtatgatgcgtgacggcttgaaacctatcatctttctcctgaacaacaacggttacaccgttgaacgggcgattcacggcgcggagcaacgttataacgatatcgctgcttggaattggacccaactgccccaggcgctgagtgttcattgcccagcgcagagctggcgagtcgttgaaacggtgcagctgaccgacgtaatgaaagtcatcgctgcttctccgcgtctgagcttggtagaagttgttctgcctgcaatggatgtcccaccgctgctgcaagcagtgagtgccgctctgaaccagcgcaactcctcttaagaccagaggtaaggaggtaacaaccatgcgagtgttgaagaaacatcttaatcatgcaggggagggtttctaatgcgcagcatgcagtttgatgagtacggtgcacccctgaaagcgttctcatatgaagacccgaccccgcaagggaaggaagtagtcgttaggatcgaagcctgtggtgtgtgccactctgatattcatcttcacgagggctacttcgacatgggcggtggcaataaagctgatgttactcgtgctcgcgaactcccttttacattgggtcatgaaatcgttggcgaagtggtagcaactggaccaggtgtcaccggcgctaaaccgggcgacaaacgtattgtgtacccgtggatcgggtgcggcgactgcccgaaatgcaacagtggtgaggatcagtcctgtgcgcgtccacgtaacctgggtgttcacgttgacggtggctattcgacgcacgtaaagataccggacgaaaaattcctgttcgcctacgatggtattcctactgagttagcgggaacctatgcttgcagcggcatcaccgcttatggtgcactgatgaaagcaaaggaagcggctgaaagatctggctacatcggtctgattggcgctggtggcgttggcatggctggtctgatgctggccaaagcagcgatcggggctaaaactgtagtctttgatatcgacgacgcaaaactggaagctgcgacccgtgccggggcggattacgtgttcaactccggtgcaaaagaaacacgcaaggaagttatgaaactaacgaatggtggcctgtctggtgctgttgatttcgttggcagcgataaaagcgctctgtttggaatcaacgccttgggtcagaacggcgtgctggtcataattggactgttcggtggcgctatgactgttccggtacccctgttcccgctgaaagggatcaccgtacgtggctcatacgtaggttccctgcaagagatgagtgatatgatggagttagttcgcgctgggaaagttcctccgatgccggtaaaaactcggccactggacgctgcctgggaaacccttgaggatctacgccatggtaaaatcgtgggccgtgttgttctgaccccataagaaggagatatacatatgacccatcaattaagatcgcgcgatatcatcgctctgggctttatgacatttgcgttgttcgtcggcgcaggtaacattattttccctccaatggtcggcttgcaggcaggcgaacacgtctggactgcggcattcggcttcctcattactgccgttggcctaccggtattaacggtagtggcgctggcaaaagttggcggcggtgttgacagtctcagcacgccaattggtaaagtcgctggcgtactgctggcaacagtttgttacctggcggtggggccgctttttgctacgccgcgtacagctaccgtttcttttgaagtgggcattgcgccgctgacgggtgattccgcgctgccgctgtttatttacagcctggtctatttcgctatcgttattctggtttcgctctatccgggcaagctgctggataccgtgggcaacttccttgcgccgctgaaaattatcgcgctggtcatcctgtctgttgccgcaattatctggccggcgggttctatcagtacggcgactgaggcttatcaaaacgctgcgttttctaacggcttcgtcaacggctatctgaccatggatacgctgggcgcaatggtgtttggtatcgttattgttaacgcggcgcgttctcgtggcgttaccgaagcgcgtctgctgacccgttataccgtctgggctggcctgatggcgggtgttggtctgactctgctgtacctggcgctgttccgtctgggttcagacagcgcgtcgctggtcgatcagtctgcaaacggtgcggcgatcctgcatgcttacgttcagcatacctttggcggcggcggtagcttcctgctggcggcgttaatcttcatcgcctgcctggtcacggcggttggcctgacctgtgcttgtgcagaattcttcgcccagtacgtaccgctctcttatcgtacgctggtgtttatcctcggcggcttctcgatggtggtgtctaacctcggcttgagccagctgattcagatctctgtaccggtgctgaccgccatttatccgccgtgtatcgcactggttgtattaagttttacacgctcatggtggcataattcgtcccgcgtgattgctccgccgatgtttatcagcctgctttttggtattctcgacgggatcaaggcatctgcattcagcgatatcttaccgtcctgggcgcagcgtttaccgctggccgaacaaggtctggcgtggttaatgccaacagtggtgatggtggttctggccattatctgggatcgtgcggcaggtcgtcaggtgacctccagcgctcactaatacgcatggcatggatgaccgatggtagtgtgggctctccccatgcgagagtagggaactgccaggcatcaaataaaacgaaaggctcagtcgaaagactgggcctttcgttttatctgttgtttgtcggtgaacgctctcctgagtaggacaaatccgccgggagcggatttgaacgttgcgaagcaacggcccggagggtggcgggcaggacgcccgccataaactgccaggcatcaaattaagcagaaggccatcctgacggatggcctttttgcgtggccagtgccaagcttgcatgcgtgccagctgcattaatgaagaaatcatgctggaagaataacagctcactcaaaggcggtagtacgggttttgctgcccgcaaacgggctgttctggtgttgctagtttgttatcagaatcgcagatccggcttcagccggtttgccggctgaaagcgctatttcttccagaattgccatgattttttccccacgggaggcgtcactggctcccgtgttgtcggcagctttgattcgataagcagcatcgcctgtttcaggctgtctatgtgtgactgttgagctgtaacaagttgtctcaggtgttcaatttcatgttctagttgctttgttttactggtttcacctgttctattaggtgttacatgctgttcatctgttacattgtcgatctgttcatggtgaacagctttgaatgcaccaaaaactcgtaaaagctctgatgtatctatcttttttacaccgttttcatctgtgcatatggacagttttccctttgatatgtaacggtgaacagttgttctacttttgtttgttagtcttgatgcttcactgatagatacaagagccataagaacctcagatccttccgtatttagccagtatgttctctagtgtggttcgttgtttttgcgtgagccatgagaacgaaccattgagatcatacttactttgcatgtcactcaaaaattttgcctcaaaactggtgagctgaatttttgcagttaaagcatcgtgtagtgtttttcttagtccgttatgtaggtaggaatctgatgtaatggttgttggtattttgtcaccattcatttttatctggttgttctcaagttcggttacgagatccatttgtctatctagttcaacttggaaaatcaacgtatcagtcgggcggcctcgcttatcaaccaccaatttcatattgctgtaagtgtttaaatctttacttattggtttcaaaacccattggttaagccttttaaactcatggtagttattttcaagcattaacatgaacttaaattcatcaaggctaatctctatatttgccttgtgagttttcttttgtgttagttcttttaataaccactcataaatcctcatagagtatttgttttcaaaagacttaacatgttccagattatattttatgaatttttttaactggaaaagataaggcaatatctcttcactaaaaactaattctaatttttcgcttgagaacttggcatagtttgtccactggaaaatctcaaagcctttaaccaaaggattcctgatttccacagttctcgtcatcagctctctggttgctttagctaatacaccataagcattttccctactgatgttcatcatctgagcgtattggttataagtgaacgataccgtccgttctttccttgtagggttttcaatcgtggggttgagtagtgccacacagcataaaattagcttggtttcatgctccgttaagtcatagcgactaatcgctagttcatttgctttgaaaacaactaattcagacatacatctcaattggtctaggtgattttaatcactataccaattgagatgggctagtcaatgataattactagtccttttcctttgagttgtgggtatctgtaaattctgctagacctttgctggaaaacttgtaaattctgctagaccctctgtaaattccgctagacctttgtgtgttttttttgtttatattcaagtggttataatttatagaataaagaaagaataaaaaaagataaaaagaatagatcccagccctgtgtataactcactactttagtcagttccgcagtattacaaaaggatgtcgcaaacgctgtttgctcctctacaaaacagaccttaaaaccctaaaggcttaagtagcaccctcgcaagctcgggcaaatcgctgaatattccttttgtctccgaccatcaggcacctgagtcgctgtctttttcgtgacattcagttcgctgcgctcacggctctggcagtgaatgggggtaaatggcactacaggcgccttttatggattcatgcaaggaaactacccataatacaagaaaagcccgtcacgggcttctcagggcgttttatggcgggtctgctatgtggtgctatctgactttttgctgttcagcagttcctgccctctgattttccagtctgaccacttcggattatcccgtgacaggtcattcagactggctaatgcacccagtaaggcagcggtatcatcaacaggcttacccgtcttactgtcttttctacggggtctgacgctcagtggaacgaaaactcacgttaagggattttggtcatgagattatcaaaaaggatcttcacctagatccttttaaattaaaaatgaagttttaaatcaatctaaagtatatatgagtaaacttggtctgacagttaccaatgcttaatcagtgaggcacctatctcagcgatctgtctatttcgttcatccatagttgcctgactccccgtcgtgtagataactacgatacgggagggcttaccatctggccccagtgctgcaatgataccgcgagaaccacgctcaccggctccagatttatcagcaataaaccagccagccggaagggccgagcgcagaagtggtcctgcaactttatccgcctccatccagtctattaattgttgccgggaagctagagtaagtagttcgccagttaatagtttgcgcaacgttgttgccattgctacaggcatcgtggtgtcacgctcgtcgtttggtatggcttcattcagctccggttcccaacgatcaaggcgagttacatgatcccccatgttgtgcaaaaaagcggttagctccttcggtcctccgatcgttgtcagaagtaagttggccgcagtgttatcactcatggttatggcagcactgcataattctcttactgtcatgccatccgtaagatgcttttctgtgactggtgagtactcaaccaagtcattctgagaatagtgtatgcggcgaccgagttgctcttgcccggcgtcaatacgggataataccgcgccacatagcagaactttaaaagtgctcatcattggaaaacgttcttcggggcgaaaactctcaaggatcttaccgctgttgagatccagttcgatgtaacccactcgtgcacccaactgatcttcagcatcttttactttcaccagcgtttctgggtgagcaaaaacaggaaggcaaaatgccgcaaaaaagggaataagggcgacacggaaatgttgaatactcatactcttcctttttcaatattattgaagcatttatcagggttattgtctcatgagcggatacatatttgaatgtatttagaaaaataaacaaataggggttccgcgcacatttccccgaaaagtgccacctgacgtctaagaaaccattattatcatgacattaacctataaaaataggcgtatcacgaggccctttcgtctcgcgcgtttcggtgatgacggtgaaaacctctgacacatgcagctcccggagacggtcacagcttgtctgtaagcggatgccgggagcagacaagcccgtcagggcgcgtcagcgggtgttggcgggtgtcggggctggcttaactatgcggcatcagagcagattgtactgagagtgcaccatatgcggtgtgaaataccgcacagatgcgtaaggagaaaataccgcatcaggcgccattcgccattcaggctgcgcaactgttgggaagggcgatcggtgcgggcctcttcgctattacgccagctggcgaaagggggatgtgctgcaaggcgattaagttgggtaacgccagggttttcccagtcacgacgttgtaaaacgacggccagtgaattcgttaagacccactttcacatttaagttgtttttctaatccgcatatgatcaattcaaggccgaataagaaggctggctctgcaccttggtgatcaaataattcgatagcttgtcgtaataatggcggcatactatcagtagtaggtgtttccctttcttctttagcgacttgatgctcttgatcttccaatacgcaacctaaagtaaaatgccccacagcgctgagtgcatataatgcattctctagtgaaaaaccttgttggcataaaaaggctaattgattttcgagagtttcatactgtttttctgtaggccgtgtacctaaatgtacttttgctccatcgcgatgacttagtaaagcacatctaaaacttttagcgttattacgtaaaaaatcttgccagctttccccttctaaagggcaaaagtgagtatggtgcctatctaacatctcaatggctaaggcgtcgagcaaagcccgcttattttttacatgccaatacaatgtaggctgctctacacctagcttctgggcgagtttacgggttgttaaaccttcgattccgacctcattaagcagctctaatgcgctgttaatcactttacttttatctaatctagacatcattaattcctaatttttgttgacactctatcattgatagagttattttaccactccctatcagtgatagagaaaagtga

SEQ ID NO: 3 - DNA, 10280 bp, Artificial Sequence
  Description of Artificial Sequence: Synthetic polynucleotide
gcgaaaaatcaataaggaggcaacaagatgtgcgaaaaacatcttaatcatgctaaggaggttttctaatgaacatcttcaagaaaatggaggaatttaattatgaacaactggtctacttctacgacagcgaaacggaactcaaaggtattacctgtatacacaacacaactttagggccggcattgggcggtacccgcctttggaactataactctgaggaagatgccgttgaagacgtaatccgtctggctcggggcatgacttacaaagcggcttgcgccggtctgaatctgggcggcggtaaaaccgtgctgatcggtgatgctaaaaagattaaatcagagtcctacttccgtggactggggcgctacgttcagtcgctgaacggcagatatatcaccgcggaagacgtaaatacttctacgaaggatatggcatacgttgctatggaaactgactatgtggtaggcctgggaggtaaatccggcaaccctagtccagttactgcttacggtgcatttatgggtatcaaagcggcgctgatgaaaaaatttgaggatagctctattgaaggccgaaccttcgcagtgcagggtgctgggcagacgggttactatcttatcgattacctcctaggcaacaacaagttcaaagaaaaggctaaaaagatttacttcaccgaaattaacgagagctatatcgagcgtatgaacaaagaacatccggaagttgaatttatttccccggacaaaatctactcgctggaagtagacgtcttcgtgccctgcgccctgggcaaaatcgttaatgacaaaactatcgatgaatttaagtgtccgatcatcgcaggtactgcaaacaacgtactggaaagggaagcgcacggcaacatgcttaaagaacgtggcattctttacgccccggactatgtgatcaatgctggtgggctgatcaacgtttaccacgagctgaacggttacaataaagagaacgctattctggaagtggaattaatttatgatcgcctactggaaatattcaacatcgctgattctctgaacatcagcaccaatatcgctgccaacgagttcgcggaaaaacgtatcaagcaaattaagtccttgaaaaacaacttcattaaacgctaagtcaataaaggcatataaaaggaggttaataacatgaaagttaaagtaaaacatcttaatcatgcacaggagactttctaatgtcgacgacaaccgttggtgactacttgctgtatcgcttaaacgaaatcggcattgagcacctcttcggagtgccaggtgattacaatctgcaatttctggatcatgtaatcgaccaccctcagctgacttgggtcggctgcactaacgaacttaacgctgcctacgcagctgatggttatgcgcgttgtcgtccggctgcggcactgctgaccaccttcggggttggcgaactgagcgctattaatggcatcgcaggttcctacgcggagtatctgccggtaatacatatcgttggtgcaccgagtctatcagcccagcagcagggcgacctgattcaccactctcttggcgaaggtgatttttccagcttcctgaggatgtcccaaccggtgtctgttgcgcaggctgctctgactcctgataacgcatgcaaggaaatcgaccgcgtactggcggaagtcctcattcagcgtcgtcccggctacctgctgctgtctaccgacgtggctgctgcgccggcggctctgccacaaagcactctttctttgccgaccgccccggatcatcgcgcagttctggctgctttcagcgacgctgctgagcagatgctggctcaggccaaaagcgtctctctactggcggactttctggctgatcgtttcggtgttactcgagcactggccgcgtggcttcagcaggttccgctaccgcacgccactctgttaatgggtaaaggcgttctgagtgaacagcaaccagggttcgtgggtacctacgctggtgcggcatctatcgattcgacgcgtggcgcaatcgaagaagctggggtaattatcggagtgggagttagattttccgacactatcacagcaggcttctcgcagcagatcgacgcccgccgttttatagacattcaacccttcttctctcgtattggcgatcgccagtttgatcacttgccgatgcaggctgccgtcgcagccctgcatcaactgtgtcttcgttatcagcagcagtggtctatcaccgctcctagcccgcctgcactgccgccggctgctggtagcgagctgtcccagaacgcattctggcaggcgatgcagaacttcatccgccctggggacctgttggtggccgaccaaggtactgcggcgttcggcgcagcggcgctgcgcttaccgcagaattgccagctgcttgtgcagccgctgtggggctcaatcggttacagtctgccggccacctttggtgctcagacggcagatacagagcgtcgtgtaatcctaatcattggcgatggttcagcgcaattaactattcaggaactttccagtatgatgcgtgacggcttgaaacctatcatctttctcctgaacaacaacggttacaccgttgaacgggcgattcacggcgcggagcaacgttataacgatatcgctgcttggaattggacccaactgccccaggcgctgagtgttcattgcccagcgcagagctggcgagtcgttgaaacggtgcagctgaccgacgtaatgaaagtcatcgctgcttctccgcgtctgagcttggtagaagttgttctgcctgcaatggatgtcccaccgctgctgcaagcagtgagtgccgctctgaaccagcgcaactcctcttaagaccagaggtaaggaggtaacaaccatgcgagtgttgaagaaacatcttaatcatgcaggggagggtttctaatgacagcggagcagcaaaatggggtatccgactcacgccgtttcgaatttcaggaatttggtggccctatcgccccacagacctatcagctccccgcaccggctagcgatgaagttttgttaaaggtgaactactgcggtgtctgtcacagtgatgttcatcttcacgacggctacttcgagctgggtggcgataaacgtctgaacttcgctatgccgctgccgctgacgctgggtcacgaagtaattggcaccgttgtggctgtcggcgaccaggttactggtgtaaaaccgggggaccagcgactgatctatccgtggataggttgcggaaaatgcggcgcgtgtcaaaaaggagaagaaaacctgtgcgttactcctgcacatctgggcgtgaacaagccgggcggttacgctgatcacatcgttgtaccccattctcgctaccttctggacatttcgggtctgaacccgggtgatgccgctaccctcgcgtgctccggcctgaccactttcagcgcgatcaacaaagtgttgccgcttgcagatgaccagtggattgttgttatcggttgtggtggcctcggccagatggcgctgcgtatcctgcaagctatgggaattggcaatgttatcggtattgacctgtctgaagagaaacggaaactggctcatgaaagcggtgcacgtcactccttcgatccaaacactccgaagctgaaccgcgtggtcgccgaaacctgcccgggtacggtacaggccgcgttagactttgtgggcaatgagcaaactgctcagctggcactgtctctgcttggaaaaggtggcaaatatgttcctgtcgggctgcacggcggcgagctgcgttacccattgccgatcatcacgaacaaagctgtaagtatcatcggttcttacgttggtaccctgaaagaactggaagacttagttgctttcgccaaggaaaagaatctgccgccaattcatattgaacaccgcccgctggaatcggcggctcaggccgtagaggacctggaaaaaggacaggttgctgggcgtgttatcctggatgcaggtaactaagaaggagatatacatatgacccatcaattaagatcgcgcgatatcatcgctctgggctttatgacatttgcgttgttcgtcggcgcaggtaacattattttccctccaatggtcggcttgcaggcaggcgaacacgtctggactgcggcattcggcttcctcattactgccgttggcctaccggtattaacggtagtggcgctggcaaaagttggcggcggtgttgacagtctcagcacgccaattggtaaagtcgctggcgtactgctggcaacagtttgttacctggcggtggggccgctttttgctacgccgcgtacagctaccgtttcttttgaagtgggcattgcgccgctgacgggtgattccgcgctgccgctgtttatttacagcctggtctatttcgctatcgttattctggtttcgctctatccgggcaagctgctggataccgtgggcaacttccttgcgccgctgaaaattatcgcgctggtcatcctgtctgttgccgcaattatctggccggcgggttctatcagtacggcgactgaggcttatcaaaacgctgcgttttctaacggcttcgtcaacggctatctgaccatggatacgctgggcgcaatggtgtttggtatcgttattgttaacgcggcgcgttctcgtggcgttaccgaagcgcgtctgctgacccgttataccgtctgggctggcctgatggcgggtgttggtctgactctgctgtacctggcgctgttccgtctgggttcagacagcgcgtcgctggtcgatcagtctgcaaacggtgcggcgatcctgcatgcttacgttcagcatacctttggcggcggcggtagcttcctgctggcggcgttaatcttcatcgcctgcctggtcacggcggttggcctgacctgtgcttgtgcagaattcttcgcccagtacgtaccgctctcttatcgtacgctggtgtttatcctcggcggcttctcgatggtggtgtctaacctcggcttgagccagctgattcagatctctgtaccggtgctgaccgccatttatccgccgtgtatcgcactggttgtattaagttttacacgctcatggtggcataattcgtcccgcgtgattgctccgccgatgtttatcagcctgctttttggtattctcgacgggatcaaggcatctgcattcagcgatatcttaccgtcctgggcgcagcgtttaccgctggccgaacaaggtctggcgtggttaatgccaacagtggtgatggtggttctggccattatctgggatcgtgcggcaggtcgtcaggtgacctccagcgctcactaatacgcatggcatggatgaccgatggtagtgtgggctctccccatgcgagagtagggaactgccaggcatcaaataaaacgaaaggctcagtcgaaagactgggcctttcgttttatctgttgtttgtcggtgaacgctctcctgagtaggacaaatccgccgggagcggatttgaacgttgcgaagcaacggcccggagggtggcgggcaggacgcccgccataaactgccaggcatcaaattaagcagaaggccatcctgacggatggcctttttgcgtggccagtgccaagcttgcatgcgtgccagctgcattaatgaagaaatcatgctggaagaataacagctcactcaaaggcggtagtacgggttttgctgcccgcaaacgggctgttctggtgttgctagtttgttatcagaatcgcagatccggcttcagccggtttgccggctgaaagcgctatttcttccagaattgccatgattttttccccacgggaggcgtcactggctcccgtgttgtcggcagctttgattcgataagcagcatcgcctgtttcaggctgtctatgtgtgactgttgagctgtaacaagttgtctcaggtgttcaatttcatgttctagttgctttgttttactggtttcacctgttctattaggtgttacatgctgttcatctgttacattgtcgatctgttcatggtgaacagctttgaatgcaccaaaaactcgtaaaagctctgatgtatctatcttttttacaccgttttcatctgtgcatatggacagttttccctttgatatgtaacggtgaacagttgttctacttttgtttgttagtcttgatgcttcactgatagatacaagagccataagaacctcagatccttccgtatttagccagtatgttctctagtgtggttcgttgtttttgcgtgagccatgagaacgaaccattgagatcatacttactttgcatgtcactcaaaaattttgcctcaaaactggtgagctgaatttttgcagttaaagcatcgtgtagtgtttttcttagtccgttatgtaggtaggaatctgatgtaatggttgttggtattttgtcaccattcatttttatctggttgttctcaagttcggttacgagatccatttgtctatctagttcaacttggaaaatcaacgtatcagtcgggcggcctcgcttatcaaccaccaatttcatattgctgtaagtgtttaaatctttacttattggtttcaaaacccattggttaagccttttaaactcatggtagttattttcaagcattaacatgaacttaaattcatcaaggctaatctctatatttgccttgtgagttttcttttgtgttagttcttttaataaccactcataaatcctcatagagtatttgttttcaaaagacttaacatgttccagattatattttatgaatttttttaactggaaaagataaggcaatatctcttcactaaaaactaattctaatttttcgcttgagaacttggcatagtttgtccactggaaaatctcaaagcctttaaccaaaggattcctgatttccacagttctcgtcatcagctctctggttgctttagctaatacaccataagcattttccctactgatgttcatcatctgagcgtattggttataagtgaacgataccgtccgttctttccttgtagggttttcaatcgtggggttgagtagtgccacacagcataaaattagcttggtttcatgctccgttaagtcatagcgactaatcgctagttcatttgctttgaaaacaactaattcagacatacatctcaattggtctaggtgattttaatcactataccaattgagatgggctagtcaatgataattactagtccttttcctttgagttgtgggtatctgtaaattctgctagacctttgctggaaaacttgtaaattctgctagaccctctgtaaattccgctagacctttgtgtgttttttttgtttatattcaagtggttataatttatagaataaagaaagaataaaaaaagataaaaagaatagatcccagccctgtgtataactcactactttagtcagttccgcagtattacaaaaggatgtcgcaaacgctgtttgctcctctacaaaacagaccttaaaaccctaaaggcttaagtagcaccctcgcaagctcgggcaaatcgctgaatattccttttgtctccgaccatcaggcacctgagtcgctgtctttttcgtgacattcagttcgctgcgctcacggctctggcagtgaatgggggtaaatggcactacaggcgccttttatggattcatgcaaggaaactacccataatacaagaaaagcccgtcacgggcttctcagggcgttttatggcgggtctgctatgtggtgctatctgactttttgctgttcagcagttcctgccctctgattttccagtctgaccacttcggattatcccgtgacaggtcattcagactggctaatgcacccagtaaggcagcggtatcatcaacaggcttacccgtcttactgtcttttctacggggtctgacgctcagtggaacgaaaactcacgttaagggattttggtcatgagattatcaaaaaggatcttcacctagatccttttaaattaaaaatgaagttttaaatcaatctaaagtatatatgagtaaacttggtctgacagttaccaatgcttaatcagtgaggcacctatctcagcgatctgtctatttcgttcatccatagttgcctgactccccgtcgtgtagataactacgatacgggagggcttaccatctggccccagtgctgcaatgataccgcgagaaccacgctcaccggctccagatttatcagcaataaaccagccagccggaagggccgagcgcagaagtggtcctgcaactttatccgcctccatccagtctattaattgttgccgggaagctagagtaagtagttcgccagttaatagtttgcgcaacgttgttgccattgctacaggcatcgtggtgtcacgctcgtcgtttggtatggcttcattcagctccggttcccaacgatcaaggcgagttacatgatcccccatgttgtgcaaaaaagcggttagctccttcggtcctccgatcgttgtcagaagtaagttggccgcagtgttatcactcatggttatggcagcactgcataattctcttactgtcatgccatccgtaagatgcttttctgtgactggtgagtactcaaccaagtcattctgagaatagtgtatgcggcgaccgagttgctcttgcccggcgtcaatacgggataataccgcgccacatagcagaactttaaaagtgctcatcattggaaaacgttcttcggggcgaaaactctcaaggatcttaccgctgttgagatccagttcgatgtaacccactcgtgcacccaactgatcttcagcatcttttactttcaccagcgtttctgggtgagcaaaaacaggaaggcaaaatgccgcaaaaaagggaataagggcgacacggaaatgttgaatactcatactcttcctttttcaatattattgaagcatttatcagggttattgtctcatgagcggatacatatttgaatgtatttagaaaaataaacaaataggggttccgcgcacatttccccgaaaagtgccacctgacgtctaagaaaccattattatcatgacattaacctataaaaataggcgtatcacgaggccctttcgtctcgcgcgtttcggtgatgacggtgaaaacctctgacacatgcagctcccggagacggtcacagcttgtctgtaagcggatgccgggagcagacaagcccgtcagggcgcgtcagcgggtgttggcgggtgtcggggctggcttaactatgcggcatcagagcagattgtactgagagtgcaccatatgcggtgtgaaataccgcacagatgcgtaaggagaaaataccgcatcaggcgccattcgccattcaggctgcgcaactgttgggaagggcgatcggtgcgggcctcttcgctattacgccagctggcgaaagggggatgtgctgcaaggcgattaagttgggtaacgccagggttttcccagtcacgacgttgtaaaacgacggccagtgaattcgttaagacccactttcacatttaagttgtttttctaatccgcatatgatcaattcaaggccgaataagaaggctggctctgcaccttggtgatcaaataattcgatagcttgtcgtaataatggcggcatactatcagtagtaggtgtttccctttcttctttagcgacttgatgctcttgatcttccaatacgcaacctaaagtaaaatgccccacagcgctgagtgcatataatgcattctctagtgaaaaaccttgttggcataaaaaggctaattgattttcgagagtttcatactgtttttctgtaggccgtgtacctaaatgtacttttgctccatcgcgatgacttagtaaagcacatctaaaacttttagcgttattacgtaaaaaatcttgccagctttccccttctaaagggcaaaagtgagtatggtgcctatctaacatctcaatggctaaggcgtcgagcaaagcccgcttattttttacatgccaatacaatgtaggctgctctacacctagcttctgggcgagtttacgggttgttaaaccttcgattccgacctcattaagcagctctaatgcgctgttaatcactttacttttatctaatctagacatcattaattcctaatttttgttgacactctatcattgatagagttattttaccactccctatcagtgatagagaaaagtga

SEQ ID NO: 4 - DNA, 10202 bp, Artificial Sequence
  Description of Artificial Sequence: Synthetic polynucleotide
gcgaaaaatcaataaggaggcaacaagatgtgcgaaaaacatcttaatcatgctaaggaggttttctaatggtagagatccaggctttgccggaaacttccatttttgggcaaatcgcagaccaccagcatgaacaggtggtcttctgccacgatcacgaaaccggcctccgtgcgataatcggtattcataacacggttcttggccccgccttaggtggaactcgcatgtggcactatgctaccgaggcagaagcgctgaatgacgttctgcgtctgtctcgcggtatgacctacaaggctgctatctcgggcctgaacctgggtggcggtaaagcagtaatcattggggatgccaaaacaatcaaaaccgaagcgctgctgcggaaattcggcagattcgtgcagaacctgaatggtaaatacatcactgctgaagacgttaacatgactacaaaggatatggagtacattaggatggaaaccaaacacgtcgctggcttacctgaaagtatgggtggaagcggtgacccgtcaccggtaactgcatatggtacgtacatgggcatgaaagcggcggccaaaaaggcgtttggctctgattccctggctggcaaacgtatcgctgttcaaggtgtgggtcatgttggcacttatctgcttgagcatttgaccaaagaaggtgctcagattgtgctgactgactactataaggaacgtgccgaggaagcaggcgcgcgttttggcgcacaggttgttggcctggacgatatctacgatcaagaggtcgacatttactctccatgtgctctcggtgctaccatcaacgatgacactatcgatcgcctgcgttgcgctgttgtagccggttgcgcaaacaaccagctgaaagaagaaaacgtccacggtccggcgctggttgagcgcgggatagtatacgccccagacttcctgatcaatgcagggggcctgattaacgtgtatagcgaagttacagggtctacccgtcagggggctttaactcagaccgaaaaaatctatgactacacactccaagttctggaaaaagccgcggctgaaggtctgcacccgcagcaggctgcgatccgtcaggcggaacaacgcatcgctgcaattggtaaggtgaaaagcacctactaagtcaataaaggcatataaaaggaggttaataacatgaaagttaaagtaaaacatcttaatcatgcacaggagactttctaatgtcgacgacaaccgttggtgactacttgctgtatcgcttaaacgaaatcggcattgagcacctcttcggagtgccaggtgattacaatctgcaatttctggatcatgtaatcgaccaccctcagctgacttgggtcggctgcactaacgaacttaacgctgcctacgcagctgatggttatgcgcgttgtcgtccggctgcggcactgctgaccaccttcggggttggcgaactgagcgctattaatggcatcgcaggttcctacgcggagtatctgccggtaatacatatcgttggtgcaccgagtctatcagcccagcagcagggcgacctgattcaccactctcttggcgaaggtgatttttccagcttcctgaggatgtcccaaccggtgtctgttgcgcaggctgctctgactcctgataacgcatgcaaggaaatcgaccgcgtactggcggaagtcctcattcagcgtcgtcccggctacctgctgctgtctaccgacgtggctgctgcgccggcggctctgccacaaagcactctttctttgccgaccgccccggatcatcgcgcagttctggctgctttcagcgacgctgctgagcagatgctggctcaggccaaaagcgtctctctactggcggactttctggctgatcgtttcggtgttactcgagcactggccgcgtggcttcagcaggttccgctaccgcacgccactctgttaatgggtaaaggcgttctgagtgaacagcaaccagggttcgtgggtacctacgctggtgcggcatctatcgattcgacgcgtggcgcaatcgaagaagctggggtaattatcggagtgggagttagattttccgacactatcacagcaggcttctcgcagcagatcgacgcccgccgttttatagacattcaacccttcttctctcgtattggcgatcgccagtttgatcacttgccgatgcaggctgccgtcgcagccctgcatcaactgtgtcttcgttatcagcagcagtggtctatcaccgctcctagcccgcctgcactgccgccggctgctggtagcgagctgtcccagaacgcattctggcaggcgatgcagaacttcatccgccctggggacctgttggtggccgaccaaggtactgcggcgttcggcgcagcggcgctgcgcttaccgcagaattgccagctgcttgtgcagccgctgtggggctcaatcggttacagtctgccggccacctttggtgctcagacggcagatacagagcgtcgtgtaatcctaatcattggcgatggttcagcgcaattaactattcaggaactttccagtatgatgcgtgacggcttgaaacctatcatctttctcctgaacaacaacggttacaccgttgaacgggcgattcacggcgcggagcaacgttataacgatatcgctgcttggaattggacccaactgccccaggcgctgagtgttcattgcccagcgcagagctggcgagtcgttgaaacggtgcagctgaccgacgtaatgaaagtcatcgctgcttctccgcgtctgagcttggtagaagttgttctgcctgcaatggatgtcccaccgctgctgcaagcagtgagtgccgctctgaaccagcgcaactcctcttaagaccagaggtaaggaggtaacaaccatgcgagtgttgaagaaacatcttaatcatgcaggggagggtttctaatgcagacggcgttcttgtataagccaggtcacgaaaacttagtgcgctcggagatcccgatacctaaagctgggcgtggcgaagtcgttctggaaattaaagccgctggcatgtgccattccgatctgcacgttctcgacggtggaatccccctgccgggtcaatttgtaatgggccatgaaatcgttggtactattcacgagatcggccaggacgtgaccggtttcaaacagggcgatctgtacgcagtccacggcccgaatccgtgtggtatttgcaccctgtgcagagaaggatttgataacgactgcactacagtggcgaaaaccggtcaatggttcggactgggtcttgacggcggctaccagaagtatatccgtatcccgaacgtaaggtctatcgttaaagttccagaaggtgtttcagctgaggcagctgcgagctgtactgatgcagtactgaccccgtaccgtgcactaaaacaggctggcgccagcaactctactcgggtactgattctgggtctgggtggcttaggtctgaatgcccttaaactggctaagaccttcggcagttacgtttacgcatctgacctgaaaccttctgcgcgtgaagctgctaaggccgctggggcggatgaagtgctggagtccctgcccgaagacccgctgggtgttgatatcgtgttagacgtcgttggcgtgcagagcaccttcaacctcgctcaaaaacacgttggcccgcgtggcatcattgtacctgtaggcctggcatccccacagctttcgtttaacctaacggatctggcgctccgcgaaattcgtgttcagggcactttttggggcacgagcaatgagctggctgaatgtctgcgcctgtgccagctgggcctgatcaacccgaaatatactgtggtgcctcttgaagaagcgccgaaatatatggaagcaatggctcatgggaaagtagaaggtcgtatcgttttccacccgtaagaaggagatatacatatgacccatcaattaagatcgcgcgatatcatcgctctgggctttatgacatttgcgttgttcgtcggcgcaggtaacattattttccctccaatggtcggcttgcaggcaggcgaacacgtctggactgcggcattcggcttcctcattactgccgttggcctaccggtattaacggtagtggcgctggcaaaagttggcggcggtgttgacagtctcagcacgccaattggtaaagtcgctggcgtactgctggcaacagtttgttacctggcggtggggccgctttttgctacgccgcgtacagctaccgtttcttttgaagtgggcattgcgccgctgacgggtgattccgcgctgccgctgtttatttacagcctggtctatttcgctatcgttattctggtttcgctctatccgggcaagctgctggataccgtgggcaacttccttgcgccgctgaaaattatcgcgctggtcatcctgtctgttgccgcaattatctggccggcgggttctatcagtacggcgactgaggcttatcaaaacgctgcgttttctaacggcttcgtcaacggctatctgaccatggatacgctgggcgcaatggtgtttggtatcgttattgttaacgcggcgcgttctcgtggcgttaccgaagcgcgtctgctgacccgttataccgtctgggctggcctgatggcgggtgttggtctgactctgctgtacctggcgctgttccgtctgggttcagacagcgcgtcgctggtcgatcagtctgcaaacggtgcggcgatcctgcatgcttacgttcagcatacctttggcggcggcggtagcttcctgctggcggcgttaatcttcatcgcctgcctggtcacggcggttggcctgacctgtgcttgtgcagaattcttcgcccagtacgtaccgctctcttatcgtacgctggtgtttatcctcggcggcttctcgatggtggtgtctaacctcggcttgagccagctgattcagatctctgtaccggtgctgaccgccatttatccgccgtgtatcgcactggttgtattaagttttacacgctcatggtggcataattcgtcccgcgtgattgctccgccgatgtttatcagcctgctttttggtattctcgacgggatcaaggcatctgcattcagcgatatcttaccgtcctgggcgcagcgtttaccgctggccgaacaaggtctggcgtggttaatgccaacagtggtgatggtggttctggccattatctgggatcgtgcggcaggtcgtcaggtgacctccagcgctcactaatacgcatggcatggatgaccgatggtagtgtgggctctccccatgcgagagtagggaactgccaggcatcaaataaaacgaaaggctcagtcgaaagactgggcctttcgttttatctgttgtttgtcggtgaacgctctcctgagtaggacaaatccgccgggagcggatttgaacgttgcgaagcaacggcccggagggtggcgggcaggacgcccgccataaactgccaggcatcaaattaagcagaaggccatcctgacggatggcctttttgcgtggccagtgccaagcttgcatgcgtgccagctgcattaatgaagaaatcatgctggaagaataacagctcactcaaaggcggtagtacgggttttgctgcccgcaaacgggctgttctggtgttgctagtttgttatcagaatcgcagatccggcttcagccggtttgccggctgaaagcgctatttcttccagaattgccatgattttttccccacgggaggcgtcactggctcccgtgttgtcggcagctttgattcgataagcagcatcgcctgtttcaggctgtctatgtgtgactgttgagctgtaacaagttgtctcaggtgttcaatttcatgttctagttgctttgttttactggtttcacctgttctattaggtgttacatgctgttcatctgttacattgtcgatctgttcatggtgaacagctttgaatgcaccaaaaactcgtaaaagctctgatgtatctatcttttttacaccgttttcatctgtgcatatggacagttttccctttgatatgtaacggtgaacagttgttctacttttgtttgttagtcttgatgcttcactgatagatacaagagccataagaacctcagatccttccgtatttagccagtatgttctctagtgtggttcgttgtttttgcgtgagccatgagaacgaaccattgagatcatacttactttgcatgtcactcaaaaattttgcctcaaaactggtgagctgaatttttgcagttaaagcatcgtgtagtgtttttcttagtccgttatgtaggtaggaatctgatgtaatggttgttggtattttgtcaccattcatttttatctggttgttctcaagttcggttacgagatccatttgtctatctagttcaacttggaaaatcaacgtatcagtcgggcggcctcgcttatcaaccaccaatttcatattgctgtaagtgtttaaatctttacttattggtttcaaaacccattggttaagccttttaaactcatggtagttattttcaagcattaacatgaacttaaattcatcaaggctaatctctatatttgccttgtgagttttcttttgtgttagttcttttaataaccactcataaatcctcatagagtatttgttttcaaaagacttaacatgttccagattatattttatgaatttttttaactggaaaagataaggcaatatctcttcactaaaaactaattctaatttttcgcttgagaacttggcatagtttgtccactggaaaatctcaaagcctttaaccaaaggattcctgatttccacagttctcgtcatcagctctctggttgctttagctaatacaccataagcattttccctactgatgttcatcatctgagcgtattggttataagtgaacgataccgtccgttctttccttgtagggttttcaatcgtggggttgagtagtgccacacagcataaaattagcttggtttcatgctccgttaagtcatagcgactaatcgctagttcatttgctttgaaaacaactaattcagacatacatctcaattggtctaggtgattttaatcactataccaattgagatgggctagtcaatgataattactagtccttttcctttgagttgtgggtatctgtaaattctgctagacctttgctggaaaacttgtaaattctgctagaccctctgtaaattccgctagacctttgtgtgttttttttgtttatattcaagtggttataatttatagaataaagaaagaataaaaaaagataaaaagaatagatcccagccctgtgtataactcactactttagtcagttccgcagtattacaaaaggatgtcgcaaacgctgtttgctcctctacaaaacagaccttaaaaccctaaaggcttaagtagcaccctcgcaagctcgggcaaatcgctgaatattccttttgtctccgaccatcaggcacctgagtcgctgtctttttcgtgacattcagttcgctgcgctcacggctctggcagtgaatgggggtaaatggcactacaggcgccttttatggattcatgcaaggaaactacccataatacaagaaaagcccgtcacgggcttctcagggcgttttatggcgggtctgctatgtggtgctatctgactttttgctgttcagcagttcctgccctctgattttccagtctgaccacttcggattatcccgtgacaggtcattcagactggctaatgcacccagtaaggcagcggtatcatcaacaggcttacccgtcttactgtcttttctacggggtctgacgctcagtggaacgaaaactcacgttaagggattttggtcatgagattatcaaaaaggatcttcacctagatccttttaaattaaaaatgaagttttaaatcaatctaaagtatatatgagtaaacttggtctgacagttaccaatgcttaatcagtgaggcacctatctcagcgatctgtctatttcgttcatccatagttgcctgactccccgtcgtgtagataactacgatacgggagggcttaccatctggccccagtgctgcaatgataccgcgagaaccacgctcaccggctccagatttatcagcaataaaccagccagccggaagggccgagcgcagaagtggtcctgcaactttatccgcctccatccagtctattaattgttgccgggaagctagagtaagtagttcgccagttaatagtttgcgcaacgttgttgccattgctacaggcatcgtggtgtcacgctcgtcgtttggtatggcttcattcagctccggttcccaacgatcaaggcgagttacatgatcccccatgttgtgcaaaaaagcggttagctccttcggtcctccgatcgttgtcagaagtaagttggccgcagtgttatcactcatggttatggcagcactgcataattctcttactgtcatgccatccgtaagatgcttttctgtgactggtgagtactcaaccaagtcattctgagaatagtgtatgcggcgaccgagttgctcttgcccggcgtcaatacgggataataccgcgccacatagcagaactttaaaagtgctcatcattggaaaacgttcttcggggcgaaaactctcaaggatcttaccgctgttgagatccagttcgatgtaacccactcgtgcacccaactgatcttcagcatcttttactttcaccagcgtttctgggtgagcaaaaacaggaaggcaaaatgccgcaaaaaagggaataagggcgacacggaaatgttgaatactcatactcttcctttttcaatattattgaagcatttatcagggttattgtctcatgagcggatacatatttgaatgtatttagaaaaataaacaaataggggttccgcgcacatttccccgaaaagtgccacctgacgtctaagaaaccattattatcatgacattaacctataaaaataggcgtatcacgaggccctttcgtctcgcgcgtttcggtgatgacggtgaaaacctctgacacatgcagctcccggagacggtcacagcttgtctgtaagcggatgccgggagcagacaagcccgtcagggcgcgtcagcgggtgttggcgggtgtcggggctggcttaactatgcggcatcagagcagattgtactgagagtgcaccatatgcggtgtgaaataccgcacagatgcgtaaggagaaaataccgcatcaggcgccattcgccattcaggctgcgcaactgttgggaagggcgatcggtgcgggcctcttcgctattacgccagctggcgaaagggggatgtgctgcaaggcgattaagttgggtaacgccagggttttcccagtcacgacgttgtaaaacgacggccagtgaattcgttaagacccactttcacatttaagttgtttttctaatccgcatatgatcaattcaaggccgaataagaaggctggctctgcaccttggtgatcaaataattcgatagcttgtcgtaataatggcggcatactatcagtagtaggtgtttccctttcttctttagcgacttgatgctcttgatcttccaatacgcaacctaaagtaaaatgccccacagcgctgagtgcatataatgcattctctagtgaaaaaccttgttggcataaaaaggctaattgattttcgagagtttcatactgtttttctgtaggccgtgtacctaaatgtacttttgctccatcgcgatgacttagtaaagcacatctaaaacttttagcgttattacgtaaaaaatcttgccagctttccccttctaaagggcaaaagtgagtatggtgcctatctaacatctcaatggctaaggcgtcgagcaaagcccgcttattttttacatgccaatacaatgtaggctgctctacacctagcttctgggcgagtttacgggttgttaaaccttcgattccgacctcattaagcagctctaatgcgctgttaatcactttacttttatctaatctagacatcattaattcctaatttttgttgacactctatcattgatagagttattttaccactccctatcagtgatagagaaaagtga

SEQ ID NO: 5 - DNA, 10259 bp, Artificial Sequence
  Description of Artificial Sequence: Synthetic polynucleotide
gcgaaaaatcaataaggaggcaacaagatgtgcgaaaaacatcttaatcatgctaaggaggttttctaatggtagagatccaggctttgccggaaacttccatttttgggcaaatcgcagaccaccagcatgaacaggtggtcttctgccacgatcacgaaaccggcctccgtgcgataatcggtattcataacacggttcttggccccgccttaggtggaactcgcatgtggcactatgctaccgaggcagaagcgctgaatgacgttctgcgtctgtctcgcggtatgacctacaaggctgctatctcgggcctgaacctgggtggcggtaaagcagtaatcattggggatgccaaaacaatcaaaaccgaagcgctgctgcggaaattcggcagattcgtgcagaacctgaatggtaaatacatcactgctgaagacgttaacatgactacaaaggatatggagtacattaggatggaaaccaaacacgtcgctggcttacctgaaagtatgggtggaagcggtgacccgtcaccggtaactgcatatggtacgtacatgggcatgaaagcggcggccaaaaaggcgtttggctctgattccctggctggcaaacgtatcgctgttcaaggtgtgggtcatgttggcacttatctgcttgagcatttgaccaaagaaggtgctcagattgtgctgactgactactataaggaacgtgccgaggaagcaggcgcgcgttttggcgcacaggttgttggcctggacgatatctacgatcaagaggtcgacatttactctccatgtgctctcggtgctaccatcaacgatgacactatcgatcgcctgcgttgcgctgttgtagccggttgcgcaaacaaccagctgaaagaagaaaacgtccacggtccggcgctggttgagcgcgggatagtatacgccccagacttcctgatcaatgcagggggcctgattaacgtgtatagcgaagttacagggtctacccgtcagggggctttaactcagaccgaaaaaatctatgactacacactccaagttctggaaaaagccgcggctgaaggtctgcacccgcagcaggctgcgatccgtcaggcggaacaacgcatcgctgcaattggtaaggtgaaaagcacctactaagtcaataaaggcatataaaaggaggttaataacatgaaagttaaagtaaaacatcttaatcatgcacaggagactttctaatgtcgacgacaaccgttggtgactacttgctgtatcgcttaaacgaaatcggcattgagcacctcttcggagtgccaggtgattacaatctgcaatttctggatcatgtaatcgaccaccctcagctgacttgggtcggctgcactaacgaacttaacgctgcctacgcagctgatggttatgcgcgttgtcgtccggctgcggcactgctgaccaccttcggggttggcgaactgagcgctattaatggcatcgcaggttcctacgcggagtatctgccggtaatacatatcgttggtgcaccgagtctatcagcccagcagcagggcgacctgattcaccactctcttggcgaaggtgatttttccagcttcctgaggatgtcccaaccggtgtctgttgcgcaggctgctctgactcctgataacgcatgcaaggaaatcgaccgcgtactggcggaagtcctcattcagcgtcgtcccggctacctgctgctgtctaccgacgtggctgctgcgccggcggctctgccacaaagcactctttctttgccgaccgccccggatcatcgcgcagttctggctgctttcagcgacgctgctgagcagatgctggctcaggccaaaagcgtctctctactggcggactttctggctgatcgtttcggtgttactcgagcactggccgcgtggcttcagcaggttccgctaccgcacgccactctgttaatgggtaaaggcgttctgagtgaacagcaaccagggttcgtgggtacctacgctggtgcggcatctatcgattcgacgcgtggcgcaatcgaagaagctggggtaattatcggagtgggagttagattttccgacactatcacagcaggcttctcgcagcagatcgacgcccgccgttttatagacattcaacccttcttctctcgtattggcgatcgccagtttgatcacttgccgatgcaggctgccgtcgcagccctgcatcaactgtgtcttcgttatcagcagcagtggtctatcaccgctcctagcccgcctgcactgccgccggctgctggtagcgagctgtcccagaacgcattctggcaggcgatgcagaacttcatccgccctggggacctgttggtggccgaccaaggtactgcggcgttcggcgcagcggcgctgcgcttaccgcagaattgccagctgcttgtgcagccgctgtggggctcaatcggttacagtctgccggccacctttggtgctcagacggcagatacagagcgtcgtgtaatcctaatcattggcgatggttcagcgcaattaactattcaggaactttccagtatgatgcgtgacggcttgaaacctatcatctttctcctgaacaacaacggttacaccgttgaacgggcgattcacggcgcggagcaacgttataacgatatcgctgcttggaattggacccaactgccccaggcgctgagtgttcattgcccagcgcagagctggcgagtcgttgaaacggtgcagctgaccgacgtaatgaaagtcatcgctgcttctccgcgtctgagcttggtagaagttgttctgcctgcaatggatgtcccaccgctgctgcaagcagtgagtgccgctctgaaccagcgcaactcctcttaagaccagaggtaaggaggtaacaaccatgcgagtgttgaagaaacatcttaatcatgcaggggagggtttctaatgcgcagcatgcagtttgatgagtacggtgcacccctgaaagcgttctcatatgaagacccgaccccgcaagggaaggaagtagtcgttaggatcgaagcctgtggtgtgtgccactctgatattcatcttcacgagggctacttcgacatgggcggtggcaataaagctgatgttactcgtgctcgcgaactcccttttacattgggtcatgaaatcgttggcgaagtggtagcaactggaccaggtgtcaccggcgctaaaccgggcgacaaacgtattgtgtacccgtggatcgggtgcggcgactgcccgaaatgcaacagtggtgaggatcagtcctgtgcgcgtccacgtaacctgggtgttcacgttgacggtggctattcgacgcacgtaaagataccggacgaaaaattcctgttcgcctacgatggtattcctactgagttagcgggaacctatgcttgcagcggcatcaccgcttatggtgcactgatgaaagcaaaggaagcggctgaaagatctggctacatcggtctgattggcgctggtggcgttggcatggctggtctgatgctggccaaagcagcgatcggggctaaaactgtagtctttgatatcgacgacgcaaaactggaagctgcgacccgtgccggggcggattacgtgttcaactccggtgcaaaagaaacacgcaaggaagttatgaaactaacgaatggtggcctgtctggtgctgttgatttcgttggcagcgataaaagcgctctgtttggaatcaacgccttgggtcagaacggcgtgctggtcataattggactgttcggtggcgctatgactgttccggtacccctgttcccgctgaaagggatcaccgtacgtggctcatacgtaggttccctgcaagagatgagtgatatgatggagttagttcgcgctgggaaagttcctccgatgccggtaaaaactcggccactggacgctgcctgggaaacccttgaggatctacgccatggtaaaatcgtgggccgtgttgttctgaccccataagaaggagatatacatatgacccatcaattaagatcgcgcgatatcatcgctctgggctttatgacatttgcgttgttcgtcggcgcaggtaacattattttccctccaatggtcggcttgcaggcaggcgaacacgtctggactgcggcattcggcttcctcattactgccgttggcctaccggtattaacggtagtggcgctggcaaaagttggcggcggtgttgacagtctcagcacgccaattggtaaagtcgctggcgtactgctggcaacagtttgttacctggcggtggggccgctttttgctacgccgcgtacagctaccgtttcttttgaagtgggcattgcgccgctgacgggtgattccgcgctgccgctgtttatttacagcctggtctatttcgctatcgttattctggtttcgctctatccgggcaagctgctggataccgtgggcaacttccttgcgccgctgaaaattatcgcgctggtcatcctgtctgttgccgcaattatctggccggcgggttctatcagtacggcgactgaggcttatcaaaacgctgcgttttctaacggcttcgtcaacggctatctgaccatggatacgctgggcgcaatggtgtttggtatcgttattgttaacgcggcgcgttctcgtggcgttaccgaagcgcgtctgctgacccgttataccgtctgggctggcctgatggcgggtgttggtctgactctgctgtacctggcgctgttccgtctgggttcagacagcgcgtcgctggtcgatcagtctgcaaacggtgcggcgatcctgcatgcttacgttcagcatacctttggcggcggcggtagcttcctgctggcggcgttaatcttcatcgcctgcctggtcacggcggttggcctgacctgtgcttgtgcagaattcttcgcccagtacgtaccgctctcttatcgtacgctggtgtttatcctcggcggcttctcgatggtggtgtctaacctcggcttgagccagctgattcagatctctgtaccggtgctgaccgccatttatccgccgtgtatcgcactggttgtattaagttttacacgctcatggtggcataattcgtcccgcgtgattgctccgccgatgtttatcagcctgctttttggtattctcgacgggatcaaggcatctgcattcagcgatatcttaccgtcctgggcgcagcgtttaccgctggccgaacaaggtctggcgtggttaatgccaacagtggtgatggtggttctggccattatctgggatcgtgcggcaggtcgtcaggtgacctccagcgctcactaatacgcatggcatggatgaccgatggtagtgtgggctctccccatgcgagagtagggaactgccaggcatcaaataaaacgaaaggctcagtcgaaagactgggcctttcgttttatctgttgtttgtcggtgaacgctctcctgagtaggacaaatccgccgggagcggatttgaacgttgcgaagcaacggcccggagggtggcgggcaggacgcccgccataaactgccaggcatcaaattaagcagaaggccatcctgacggatggcctttttgcgtggccagtgccaagcttgcatgcgtgccagctgcattaatgaagaaatcatgctggaagaataacagctcactcaaaggcggtagtacgggttttgctgcccgcaaacgggctgttctggtgttgctagtttgttatcagaatcgcagatccggcttcagccggtttgccggctgaaagcgctatttcttccagaattgccatgattttttccccacgggaggcgtcactggctcccgtgttgtcggcagctttgattcgataagcagcatcgcctgtttcaggctgtctatgtgtgactgttgagctgtaacaagttgtctcaggtgttcaatttcatgttctagttgctttgttttactggtttcacctgttctattaggtgttacatgctgttcatctgttacattgtcgatctgttcatggtgaacagctttgaatgcaccaaaaactcgtaaaagctctgatgtatctatcttttttacaccgttttcatctgtgcatatggacagttttccctttgatatgtaacggtgaacagttgttctacttttgtttgttagtcttgatgcttcactgatagatacaagagccataagaacctcagatccttccgtatttagccagtatgttctctagtgtggttcgttgtttttgcgtgagccatgagaacgaaccattgagatcatacttactttgcatgtcactcaaaaattttgcctcaaaactggtgagctgaatttttgcagttaaagcatcgtgtagtgtttttcttagtccgttatgtaggtaggaatctgatgtaatggttgttggtattttgtcaccattcatttttatctggttgttctcaagttcggttacgagatccatttgtctatctagttcaacttggaaaatcaacgtatcagtcgggcggcctcgcttatcaaccaccaatttcatattgctgtaagtgtttaaatctttacttattggtttcaaaacccattggttaagccttttaaactcatggtagttattttcaagcattaacatgaacttaaattcatcaaggctaatctctatatttgccttgtgagttttcttttgtgttagttcttttaataaccactcataaatcctcatagagtatttgttttcaaaagacttaacatgttccagattatattttatgaatttttttaactggaaaagataaggcaatatctcttcactaaaaactaattctaatttttcgcttgagaacttggcatagtttgtccactggaaaatctcaaagcctttaaccaaaggattcctgatttccacagttctcgtcatcagctctctggttgctttagctaatacaccataagcattttccctactgatgttcatcatctgagcgtattggttataagtgaacgataccgtccgttctttccttgtagggttttcaatcgtggggttgagtagtgccacacagcataaaattagcttggtttcatgctccgttaagtcatagcgactaatcgctagttcatttgctttgaaaacaactaattcagacatacatctcaattggtctaggtgattttaatcactataccaattgagatgggctagtcaatgataattactagtccttttcctttgagttgtgggtatctgtaaattctgctagacctttgctggaaaacttgtaaattctgctagaccctctgtaaattccgctagacctttgtgtgttttttttgtttatattcaagtggttataatttatagaataaagaaagaataaaaaaagataaaaagaatagatcccagccctgtgtataactcactactttagtcagttccgcagtattacaaaaggatgtcgcaaacgctgtttgctcctctacaaaacagaccttaaaaccctaaaggcttaagtagcaccctcgcaagctcgggcaaatcgctgaatattccttttgtctccgaccatcaggcacctgagtcgctgtctttttcgtgacattcagttcgctgcgctcacggctctggcagtgaatgggggtaaatggcactacaggcgccttttatggattcatgcaaggaaactacccataatacaagaaaagcccgtcacgggcttctcagggcgttttatggcgggtctgctatgtggtgctatctgactttttgctgttcagcagttcctgccctctgattttccagtctgaccacttcggattatcccgtgacaggtcattcagactggctaatgcacccagtaaggcagcggtatcatcaacaggcttacccgtcttactgtcttttctacggggtctgacgctcagtggaacgaaaactcacgttaagggattttggtcatgagattatcaaaaaggatcttcacctagatccttttaaattaaaaatgaagttttaaatcaatctaaagtatatatgagtaaacttggtctgacagttaccaatgcttaatcagtgaggcacctatctcagcgatctgtctatttcgttcatccatagttgcctgactccccgtcgtgtagataactacgatacgggagggcttaccatctggccccagtgctgcaatgataccgcgagaaccacgctcaccggctccagatttatcagcaataaaccagccagccggaagggccgagcgcagaagtggtcctgcaactttatccgcctccatccagtctattaattgttgccgggaagctagagtaagtagttcgccagttaatagtttgcgcaacgttgttgccattgctacaggcatcgtggtgtcacgctcgtcgtttggtatggcttcattcagctccggttcccaacgatcaaggcgagttacatgatcccccatgttgtgcaaaaaagcggttagctccttcggtcctccgatcgttgtcagaagtaagttggccgcagtgttatcactcatggttatggcagcactgcataattctcttactgtcatgccatccgtaagatgcttttctgtgactggtgagtactcaaccaagtcattctgagaatagtgtatgcggcgaccgagttgctcttgcccggcgtcaatacgggataataccgcgccacatagcagaactttaaaagtgctcatcattggaaaacgttcttcggggcgaaaactctcaaggatcttaccgctgttgagatccagttcgatgtaacccactcgtgcacccaactgatcttcagcatcttttactttcaccagcgtttctgggtgagcaaaaacaggaaggcaaaatgccgcaaaaaagggaataagggcgacacggaaatgttgaatactcatactcttcctttttcaatattattgaagcatttatcagggttattgtctcatgagcggatacatatttgaatgtatttagaaaaataaacaaataggggttccgcgcacatttccccgaaaagtgccacctgacgtctaagaaaccattattatcatgacattaacctataaaaataggcgtatcacgaggccctttcgtctcgcgcgtttcggtgatgacggtgaaaacctctgacacatgcagctcccggagacggtcacagcttgtctgtaagcggatgccgggagcagacaagcccgtcagggcgcgtcagcgggtgttggcgggtgtcggggctggcttaactatgcggcatcagagcagattgtactgagagtgcaccatatgcggtgtgaaataccgcacagatgcgtaaggagaaaataccgcatcaggcgccattcgccattcaggctgcgcaactgttgggaagggcgatcggtgcgggcctcttcgctattacgccagctggcgaaagggggatgtgctgcaaggcgattaagttgggtaacgccagggttttcccagtcacgacgttgtaaaacgacggccagtgaattcgttaagacccactttcacatttaagttgtttttctaatccgcatatgatcaattcaaggccgaataagaaggctggctctgcaccttggtgatcaaataattcgatagcttgtcgtaataatggcggcatactatcagtagtaggtgtttccctttcttctttagcgacttgatgctcttgatcttccaatacgcaacctaaagtaaaatgccccacagcgctgagtgcatataatgcattctctagtgaaaaaccttgttggcataaaaaggctaattgattttcgagagtttcatactgtttttctgtaggccgtgtacctaaatgtacttttgctccatcgcgatgacttagtaaagcacatctaaaacttttagcgttattacgtaaaaaatcttgccagctttccccttctaaagggcaaaagtgagtatggtgcctatctaacatctcaatggctaaggcgtcgagcaaagcccgcttattttttacatgccaatacaatgtaggctgctctacacctagcttctgggcgagtttacgggttgttaaaccttcgattccgacctcattaagcagctctaatgcgctgttaatcactttacttttatctaatctagacatcattaattcctaatttttgttgacactctatcattgatagagttattttaccactccctatcagtgatagagaaaagtga

SEQ ID NO: 6 - DNA, 10289 bp, Artificial Sequence
  Description of Artificial Sequence: Synthetic polynucleotide
gcgaaaaatcaataaggaggcaacaagatgtgcgaaaaacatcttaatcatgctaaggaggttttctaatggtagagatccaggctttgccggaaacttccatttttgggcaaatcgcagaccaccagcatgaacaggtggtcttctgccacgatcacgaaaccggcctccgtgcgataatcggtattcataacacggttcttggccccgccttaggtggaactcgcatgtggcactatgctaccgaggcagaagcgctgaatgacgttctgcgtctgtctcgcggtatgacctacaaggctgctatctcgggcctgaacctgggtggcggtaaagcagtaatcattggggatgccaaaacaatcaaaaccgaagcgctgctgcggaaattcggcagattcgtgcagaacctgaatggtaaatacatcactgctgaagacgttaacatgactacaaaggatatggagtacattaggatggaaaccaaacacgtcgctggcttacctgaaagtatgggtggaagcggtgacccgtcaccggtaactgcatatggtacgtacatgggcatgaaagcggcggccaaaaaggcgtttggctctgattccctggctggcaaacgtatcgctgttcaaggtgtgggtcatgttggcacttatctgcttgagcatttgaccaaagaaggtgctcagattgtgctgactgactactataaggaacgtgccgaggaagcaggcgcgcgttttggcgcacaggttgttggcctggacgatatctacgatcaagaggtcgacatttactctccatgtgctctcggtgctaccatcaacgatgacactatcgatcgcctgcgttgcgctgttgtagccggttgcgcaaacaaccagctgaaagaagaaaacgtccacggtccggcgctggttgagcgcgggatagtatacgccccagacttcctgatcaatgcagggggcctgattaacgtgtatagcgaagttacagggtctacccgtcagggggctttaactcagaccgaaaaaatctatgactacacactccaagttctggaaaaagccgcggctgaaggtctgcacccgcagcaggctgcgatccgtcaggcggaacaacgcatcgctgcaattggtaaggtgaaaagcacctactaagtcaataaaggcatataaaaggaggttaataacatgaaagttaaagtaaaacatcttaatcatgcacaggagactttctaatgtcgacgacaaccgttggtgactacttgctgtatcgcttaaacgaaatcggcattgagcacctcttcggagtgccaggtgattacaatctgcaatttctggatcatgtaatcgaccaccctcagctgacttgggtcggctgcactaacgaacttaacgctgcctacgcagctgatggttatgcgcgttgtcgtccggctgcggcactgctgaccaccttcggggttggcgaactgagcgctattaatggcatcgcaggttcctacgcggagtatctgccggtaatacatatcgttggtgcaccgagtctatcagcccagcagcagggcgacctgattcaccactctcttggcgaaggtgatttttccagcttcctgaggatgtcccaaccggtgtctgttgcgcaggctgctctgactcctgataacgcatgcaaggaaatcgaccgcgtactggcggaagtcctcattcagcgtcgtcccggctacctgctgctgtctaccgacgtggctgctgcgccggcggctctgccacaaagcactctttctttgccgaccgccccggatcatcgcgcagttctggctgctttcagcgacgctgctgagcagatgctggctcaggccaaaagcgtctctctactggcggactttctggctgatcgtttcggtgttactcgagcactggccgcgtggcttcagcaggttccgctaccgcacgccactctgttaatgggtaaaggcgttctgagtgaacagcaaccagggttcgtgggtacctacgctggtgcggcatctatcgattcgacgcgtggcgcaatcgaagaagctggggtaattatcggagtgggagttagattttccgacactatcacagcaggcttctcgcagcagatcgacgcccgccgttttatagacattcaacccttcttctctcgtattggcgatcgccagtttgatcacttgccgatgcaggctgccgtcgcagccctgcatcaactgtgtcttcgttatcagcagcagtggtctatcaccgctcctagcccgcctgcactgccgccggctgctggtagcgagctgtcccagaacgcattctggcaggcgatgcagaacttcatccgccctggggacctgttggtggccgaccaaggtactgcggcgttcggcgcagcggcgctgcgcttaccgcagaattgccagctgcttgtgcagccgctgtggggctcaatcggttacagtctgccggccacctttggtgctcagacggcagatacagagcgtcgtgtaatcctaatcattggcgatggttcagcgcaattaactattcaggaactttccagtatgatgcgtgacggcttgaaacctatcatctttctcctgaacaacaacggttacaccgttgaacgggcgattcacggcgcggagcaacgttataacgatatcgctgcttggaattggacccaactgccccaggcgctgagtgttcattgcccagcgcagagctggcgagtcgttgaaacggtgcagctgaccgacgtaatgaaagtcatcgctgcttctccgcgtctgagcttggtagaagttgttctgcctgcaatggatgtcccaccgctgctgcaagcagtgagtgccgctctgaaccagcgcaactcctcttaagaccagaggtaaggaggtaacaaccatgcgagtgttgaagaaacatcttaatcatgcaggggagggtttctaatgacagcggagcagcaaaatggggtatccgactcacgccgtttcgaatttcaggaatttggtggccctatcgccccacagacctatcagctccccgcaccggctagcgatgaagttttgttaaaggtgaactactgcggtgtctgtcacagtgatgttcatcttcacgacggctacttcgagctgggtggcgataaacgtctgaacttcgctatgccgctgccgctgacgctgggtcacgaagtaattggcaccgttgtggctgtcggcgaccaggttactggtgtaaaaccgggggaccagcgactgatctatccgtggataggttgcggaaaatgcggcgcgtgtcaaaaaggagaagaaaacctgtgcgttactcctgcacatctgggcgtgaacaagccgggcggttacgctgatcacatcgttgtaccccattctcgctaccttctggacatttcgggtctgaacccgggtgatgccgctaccctcgcgtgctccggcctgaccactttcagcgcgatcaacaaagtgttgccgcttgcagatgaccagtggattgttgttatcggttgtggtggcctcggccagatggcgctgcgtatcctgcaagctatgggaattggcaatgttatcggtattgacctgtctgaagagaaacggaaactggctcatgaaagcggtgcacgtcactccttcgatccaaacactccgaagctgaaccgcgtggtcgccgaaacctgcccgggtacggtacaggccgcgttagactttgtgggcaatgagcaaactgctcagctggcactgtctctgcttggaaaaggtggcaaatatgttcctgtcgggctgcacggcggcgagctgcgttacccattgccgatcatcacgaacaaagctgtaagtatcatcggttcttacgttggtaccctgaaagaactggaagacttagttgctttcgccaaggaaaagaatctgccgccaattcatattgaacaccgcccgctggaatcggcggctcaggccgtagaggacctggaaaaaggacaggttgctgggcgtgttatcctggatgcaggtaactaagaaggagatatacatatgacccatcaattaagatcgcgcgatatcatcgctctgggctttatgacatttgcgttgttcgtcggcgcaggtaacattattttccctccaatggtcggcttgcaggcaggcgaacacgtctggactgcggcattcggcttcctcattactgccgttggcctaccggtattaacggtagtggcgctggcaaaagttggcggcggtgttgacagtctcagcacgccaattggtaaagtcgctggcgtactgctggcaacagtttgttacctggcggtggggccgctttttgctacgccgcgtacagctaccgtttcttttgaagtgggcattgcgccgctgacgggtgattccgcgctgccgctgtttatttacagcctggtctatttcgctatcgttattctggtttcgctctatccgggcaagctgctggataccgtgggcaacttccttgcgccgctgaaaattatcgcgctggtcatcctgtctgttgccgcaattatctggccggcgggttctatcagtacggcgactgaggcttatcaaaacgctgcgttttctaacggcttcgtcaacggctatctgaccatggatacgctgggcgcaatggtgtttggtatcgttattgttaacgcggcgcgttctcgtggcgttaccgaagcgcgtctgctgacccgttataccgtctgggctggcctgatggcgggtgttggtctgactctgctgtacctggcgctgttccgtctgggttcagacagcgcgtcgctggtcgatcagtctgcaaacggtgcggcgatcctgcatgcttacgttcagcatacctttggcggcggcggtagcttcctgctggcggcgttaatcttcatcgcctgcctggtcacggcggttggcctgacctgtgcttgtgcagaattcttcgcccagtacgtaccgctctcttatcgtacgctggtgtttatcctcggcggcttctcgatggtggtgtctaacctcggcttgagccagctgattcagatctctgtaccggtgctgaccgccatttatccgccgtgtatcgcactggttgtattaagttttacacgctcatggtggcataattcgtcccgcgtgattgctccgccgatgtttatcagcctgctttttggtattctcgacgggatcaaggcatctgcattcagcgatatcttaccgtcctgggcgcagcgtttaccgctggccgaacaaggtctggcgtggttaatgccaacagtggtgatggtggttctggccattatctgggatcgtgcggcaggtcgtcaggtgacctccagcgctcactaatacgcatggcatggatgaccgatggtagtgtgggctctccccatgcgagagtagggaactgccaggcatcaaataaaacgaaaggctcagtcgaaagactgggcctttcgttttatctgttgtttgtcggtgaacgctctcctgagtaggacaaatccgccgggagcggatttgaacgttgcgaagcaacggcccggagggtggcgggcaggacgcccgccataaactgccaggcatcaaattaagcagaaggccatcctgacggatggcctttttgcgtggccagtgccaagcttgcatgcgtgccagctgcattaatgaagaaatcatgctggaagaataacagctcactcaaaggcggtagtacgggttttgctgcccgcaaacgggctgttctggtgttgctagtttgttatcagaatcgcagatccggcttcagccggtttgccggctgaaagcgctatttcttccagaattgccatgattttttccccacgggaggcgtcactggctcccgtgttgtcggcagctttgattcgataagcagcatcgcctgtttcaggctgtctatgtgtgactgttgagctgtaacaagttgtctcaggtgttcaatttcatgttctagttgctttgttttactggtttcacctgttctattaggtgttacatgctgttcatctgttacattgtcgatctgttcatggtgaacagctttgaatgcaccaaaaactcgtaaaagctctgatgtatctatcttttttacaccgttttcatctgtgcatatggacagttttccctttgatatgtaacggtgaacagttgttctacttttgtttgttagtcttgatgcttcactgatagatacaagagccataagaacctcagatccttccgtatttagccagtatgttctctagtgtggttcgttgtttttgcgtgagccatgagaacgaaccattgagatcatacttactttgcatgtcactcaaaaattttgcctcaaaactggtgagctgaatttttgcagttaaagcatcgtgtagtgtttttcttagtccgttatgtaggtaggaatctgatgtaatggttgttggtattttgtcaccattcatttttatctggttgttctcaagttcggttacgagatccatttgtctatctagttcaacttggaaaatcaacgtatcagtcgggcggcctcgcttatcaaccaccaatttcatattgctgtaagtgtttaaatctttacttattggtttcaaaacccattggttaagccttttaaactcatggtagttattttcaagcattaacatgaacttaaattcatcaaggctaatctctatatttgccttgtgagttttcttttgtgttagttcttttaataaccactcataaatcctcatagagtatttgttttcaaaagacttaacatgttccagattatattttatgaatttttttaactggaaaagataaggcaatatctcttcactaaaaactaattctaatttttcgcttgagaacttggcatagtttgtccactggaaaatctcaaagcctttaaccaaaggattcctgatttccacagttctcgtcatcagctctctggttgctttagctaatacaccataagcattttccctactgatgttcatcatctgagcgtattggttataagtgaacgataccgtccgttctttccttgtagggttttcaatcgtggggttgagtagtgccacacagcataaaattagcttggtttcatgctccgttaagtcatagcgactaatcgctagttcatttgctttgaaaacaactaattcagacatacatctcaattggtctaggtgattttaatcactataccaattgagatgggctagtcaatgataattactagtccttttcctttgagttgtgggtatctgtaaattctgctagacctttgctggaaaacttgtaaattctgctagaccctctgtaaattccgctagacctttgtgtgttttttttgtttatattcaagtggttataatttatagaataaagaaagaataaaaaaagataaaaagaatagatcccagccctgtgtataactcactactttagtcagttccgcagtattacaaaaggatgtcgcaaacgctgtttgctcctctacaaaacagaccttaaaaccctaaaggcttaagtagcaccctcgcaagctcgggcaaatcgctgaatattccttttgtctccgaccatcaggcacctgagtcgctgtctttttcgtgacattcagttcgctgcgctcacggctctggcagtgaatgggggtaaatggcactacaggcgccttttatggattcatgcaaggaaactacccataatacaagaaaagcccgtcacgggcttctcagggcgttttatggcgggtctgctatgtggtgctatctgactttttgctgttcagcagttcctgccctctgattttccagtctgaccacttcggattatcccgtgacaggtcattcagactggctaatgcacccagtaaggcagcggtatcatcaacaggcttacccgtcttactgtcttttctacggggtctgacgctcagtggaacgaaaactcacgttaagggattttggtcatgagattatcaaaaaggatcttcacctagatccttttaaattaaaaatgaagttttaaatcaatctaaagtatatatgagtaaacttggtctgacagttaccaatgcttaatcagtgaggcacctatctcagcgatctgtctatttcgttcatccatagttgcctgactccccgtcgtgtagataactacgatacgggagggcttaccatctggccccagtgctgcaatgataccgcgagaaccacgctcaccggctccagatttatcagcaataaaccagccagccggaagggccgagcgcagaagtggtcctgcaactttatccgcctccatccagtctattaattgttgccgggaagctagagtaagtagttcgccagttaatagtttgcgcaacgttgttgccattgctacaggcatcgtggtgtcacgctcgtcgtttggtatggcttcattcagctccggttcccaacgatcaaggcgagttacatgatcccccatgttgtgcaaaaaagcggttagctccttcggtcctccgatcgttgtcagaagtaagttggccgcagtgttatcactcatggttatggcagcactgcataattctcttactgtcatgccatccgtaagatgcttttctgtgactggtgagtactcaaccaagtcattctgagaatagtgtatgcggcgaccgagttgctcttgcccggcgtcaatacgggataataccgcgccacatagcagaactttaaaagtgctcatcattggaaaacgttcttcggggcgaaaactctcaaggatcttaccgctgttgagatccagttcgatgtaacccactcgtgcacccaactgatcttcagcatcttttactttcaccagcgtttctgggtgagcaaaaacaggaaggcaaaatgccgcaaaaaagggaataagggcgacacggaaatgttgaatactcatactcttcctttttcaatattattgaagcatttatcagggttattgtctcatgagcggatacatatttgaatgtatttagaaaaataaacaaataggggttccgcgcacatttccccgaaaagtgccacctgacgtctaagaaaccattattatcatgacattaacctataaaaataggcgtatcacgaggccctttcgtctcgcgcgtttcggtgatgacggtgaaaacctctgacacatgcagctcccggagacggtcacagcttgtctgtaagcggatgccgggagcagacaagcccgtcagggcgcgtcagcgggtgttggcgggtgtcggggctggcttaactatgcggcatcagagcagattgtactgagagtgcaccatatgcggtgtgaaataccgcacagatgcgtaaggagaaaataccgcatcaggcgccattcgccattcaggctgcgcaactgttgggaagggcgatcggtgcgggcctcttcgctattacgccagctggcgaaagggggatgtgctgcaaggcgattaagttgggtaacgccagggttttcccagtcacgacgttgtaaaacgacggccagtgaattcgttaagacccactttcacatttaagttgtttttctaatccgcatatgatcaattcaaggccgaataagaaggctggctctgcaccttggtgatcaaataattcgatagcttgtcgtaataatggcggcatactatcagtagtaggtgtttccctttcttctttagcgacttgatgctcttgatcttccaatacgcaacctaaagtaaaatgccccacagcgctgagtgcatataatgcattctctagtgaaaaaccttgttggcataaaaaggctaattgattttcgagagtttcatactgtttttctgtaggccgtgtacctaaatgtacttttgctccatcgcgatgacttagtaaagcacatctaaaacttttagcgttattacgtaaaaaatcttgccagctttccccttctaaagggcaaaagtgagtatggtgcctatctaacatctcaatggctaaggcgtcgagcaaagcccgcttattttttacatgccaatacaatgtaggctgctctacacctagcttctgggcgagtttacgggttgttaaaccttcgattccgacctcattaagcagctctaatgcgctgttaatcactttacttttatctaatctagacatcattaattcctaatttttgttgacactctatcattgatagagttattttaccactccctatcagtgatagagaaaagtga

SEQ ID NO: 7 - DNA, 10268 bp, Artificial Sequence
  Description of Artificial Sequence: Synthetic polynucleotide
gcgaaaaatcaataaggaggcaacaagatgtgcgaaaaacatcttaatcatgctaaggaggttttctaatgatcttcgagacaatttctacgtcgaatcacgaagaagttgtgtattgccataacaaggacgccggcttgaaagcaatcatcgcgattcacaacactgtactcggtccggctctgggtggcactcgcatgtggccctacgctagcgaagaggaagcactgaaagatgtccttcgtttatcccgtgggatgacctacaaagctgcggtttcaggtctaaacctgggcggcggtaaagctgtgatctggggtgatccgaataaagacaagtctgaagcgctgtttagagccttcggacggtttgtaaacagcctgggcggacgctacattaccgcggaggacgttggcattgatgttaacgacatggaatatgtgctgcgtgaaactgattacgtcaccggtgtacatcaggttcacggtgggagtggtgatccttctccattcaccgcatatggcactctgcaaggcctgatggccgctctgcaagtgaaattcggtaacgaagacgtaggcaattacagctacgctgttcagggtgtgggtcacgttggcatggaatttgttaaactgctgcgtgagcgcggtgcaaaggttttcgtcactgacatcaacaaagatgcggtccagcgtgctgtggacgaatttggttgtgaggcagtagccctggatgaaatctatgacgttgattgcgacgtgtactccccgaccgctctgggcggcaccgtgaacgataaaactttaccgcgtctgaaatgtaaggtaatctgcggtgcggcaaacaaccagttagctaatgatgagataggcgtggaactggaaaagaaaggcatcctctatgctccggactacgcggtcaacgcgggtgggctgatgaacgttagcctggaaatcgatggatacaaccgcgaacgtgcgatgcgtatgatgcgtaccatttattacaatttgggtcgcattttcgaaatctctaagcgcgacggcatccctacattccgagccgccgatcgtatggctgaagaacgcataacggccatcggtaaactgcgtttaccgcatttgggcgctgcggcaccgcgcttccagggccgacgtggcaactaagtcaataaaggcatataaaaggaggttaataacatgaaagttaaagtaaaacatcttaatcatgcacaggagactttctaatgtcgacgacaaccgttggtgactacttgctgtatcgcttaaacgaaatcggcattgagcacctcttcggagtgccaggtgattacaatctgcaatttctggatcatgtaatcgaccaccctcagctgacttgggtcggctgcactaacgaacttaacgctgcctacgcagctgatggttatgcgcgttgtcgtccggctgcggcactgctgaccaccttcggggttggcgaactgagcgctattaatggcatcgcaggttcctacgcggagtatctgccggtaatacatatcgttggtgcaccgagtctatcagcccagcagcagggcgacctgattcaccactctcttggcgaaggtgatttttccagcttcctgaggatgtcccaaccggtgtctgttgcgcaggctgctctgactcctgataacgcatgcaaggaaatcgaccgcgtactggcggaagtcctcattcagcgtcgtcccggctacctgctgctgtctaccgacgtggctgctgcgccggcggctctgccacaaagcactctttctttgccgaccgccccggatcatcgcgcagttctggctgctttcagcgacgctgctgagcagatgctggctcaggccaaaagcgtctctctactggcggactttctggctgatcgtttcggtgttactcgagcactggccgcgtggcttcagcaggttccgctaccgcacgccactctgttaatgggtaaaggcgttctgagtgaacagcaaccagggttcgtgggtacctacgctggtgcggcatctatcgattcgacgcgtggcgcaatcgaagaagctggggtaattatcggagtgggagttagattttccgacactatcacagcaggcttctcgcagcagatcgacgcccgccgttttatagacattcaacccttcttctctcgtattggcgatcgccagtttgatcacttgccgatgcaggctgccgtcgcagccctgcatcaactgtgtcttcgttatcagcagcagtggtctatcaccgctcctagcccgcctgcactgccgccggctgctggtagcgagctgtcccagaacgcattctggcaggcgatgcagaacttcatccgccctggggacctgttggtggccgaccaaggtactgcggcgttcggcgcagcggcgctgcgcttaccgcagaattgccagctgcttgtgcagccgctgtggggctcaatcggttacagtctgccggccacctttggtgctcagacggcagatacagagcgtcgtgtaatcctaatcattggcgatggttcagcgcaattaactattcaggaactttccagtatgatgcgtgacggcttgaaacctatcatctttctcctgaacaacaacggttacaccgttgaacgggcgattcacggcgcggagcaacgttataacgatatcgctgcttggaattggacccaactgccccaggcgctgagtgttcattgcccagcgcagagctggcgagtcgttgaaacggtgcagctgaccgacgtaatgaaagtcatcgctgcttctccgcgtctgagcttggtagaagttgttctgcctgcaatggatgtcccaccgctgctgcaagcagtgagtgccgctctgaaccagcgcaactcctcttaagaccagaggtaaggaggtaacaaccatgcgagtgttgaagaaacatcttaatcatgcaggggagggtttctaatgcgcagcatgcagtttgatgagtacggtgcacccctgaaagcgttctcatatgaagacccgaccccgcaagggaaggaagtagtcgttaggatcgaagcctgtggtgtgtgccactctgatattcatcttcacgagggctacttcgacatgggcggtggcaataaagctgatgttactcgtgctcgcgaactcccttttacattgggtcatgaaatcgttggcgaagtggtagcaactggaccaggtgtcaccggcgctaaaccgggcgacaaacgtattgtgtacccgtggatcgggtgcggcgactgcccgaaatgcaacagtggtgaggatcagtcctgtgcgcgtccacgtaacctgggtgttcacgttgacggtggctattcgacgcacgtaaagataccggacgaaaaattcctgttcgcctacgatggtattcctactgagttagcgggaacctatgcttgcagcggcatcaccgcttatggtgcactgatgaaagcaaaggaagcggctgaaagatctggctacatcggtctgattggcgctggtggcgttggcatggctggtctgatgctggccaaagcagcgatcggggctaaaactgtagtctttgatatcgacgacgcaaaactggaagctgcgacccgtgccggggcggattacgtgttcaactccggtgcaaaagaaacacgcaaggaagttatgaaactaacgaatggtggcctgtctggtgctgttgatttcgttggcagcgataaaagcgctctgtttggaatcaacgccttgggtcagaacggcgtgctggtcataattggactgttcggtggcgctatgactgttccggtacccctgttcccgctgaaagggatcaccgtacgtggctcatacgtaggttccctgcaagagatgagtgatatgatggagttagttcgcgctgggaaagttcctccgatgccggtaaaaactcggccactggacgctgcctgggaaacccttgaggatctacgccatggtaaaatcgtgggccgtgttgttctgaccccataagaaggagatatacatatgacccatcaattaagatcgcgcgatatcatcgctctgggctttatgacatttgcgttgttcgtcggcgcaggtaacattattttccctccaatggtcggcttgcaggcaggcgaacacgtctggactgcggcattcggcttcctcattactgccgttggcctaccggtattaacggtagtggcgctggcaaaagttggcggcggtgttgacagtctcagcacgccaattggtaaagtcgctggcgtactgctggcaacagtttgttacctggcggtggggccgctttttgctacgccgcgtacagctaccgtttcttttgaagtgggcattgcgccgctgacgggtgattccgcgctgccgctgtttatttacagcctggtctatttcgctatcgttattctggtttcgctctatccgggcaagctgctggataccgtgggcaacttccttgcgccgctgaaaattatcgcgctggtcatcctgtctgttgccgcaattatctggccggcgggttctatcagtacggcgactgaggcttatcaaaacgctgcgttttctaacggcttcgtcaacggctatctgaccatggatacgctgggcgcaatggtgtttggtatcgttattgttaacgcggcgcgttctcgtggcgttaccgaagcgcgtctgctgacccgttataccgtctgggctggcctgatggcgggtgttggtctgactctgctgtacctggcgctgttccgtctgggttcagacagcgcgtcgctggtcgatcagtctgcaaacggtgcggcgatcctgcatgcttacgttcagcatacctttggcggcggcggtagcttcctgctggcggcgttaatcttcatcgcctgcctggtcacggcggttggcctgacctgtgcttgtgcagaattcttcgcccagtacgtaccgctctcttatcgtacgctggtgtttatcctcggcggcttctcgatggtggtgtctaacctcggcttgagccagctgattcagatctctgtaccggtgctgaccgccatttatccgccgtgtatcgcactggttgtattaagttttacacgctcatggtggcataattcgtcccgcgtgattgctccgccgatgtttatcagcctgctttttggtattctcgacgggatcaaggcatctgcattcagcgatatcttaccgtcctgggcgcagcgtttaccgctggccgaacaaggtctggcgtggttaatgccaacagtggtgatggtggttctggccattatctgggatcgtgcggcaggtcgtcaggtgacctccagcgctcactaatacgcatggcatggatgaccgatggtagtgtgggctctccccatgcgagagtagggaactgccaggcatcaaataaaacgaaaggctcagtcgaaagactgggcctttcgttttatctgttgtttgtcggtgaacgctctcctgagtaggacaaatccgccgggagcggatttgaacgttgcgaagcaacggcccggagggtggcgggcaggacgcccgccataaactgccaggcatcaaattaagcagaaggccatcctgacggatggcctttttgcgtggccagtgccaagcttgcatgcgtgccagctgcattaatgaagaaatcatgctggaagaataacagctcactcaaaggcggtagtacgggttttgctgcccgcaaacgggctgttctggtgttgctagtttgttatcagaatcgcagatccggcttcagccggtttgccggctgaaagcgctatttcttccagaattgccatgattttttccccacgggaggcgtcactggctcccgtgttgtcggcagctttgattcgataagcagcatcgcctgtttcaggctgtctatgtgtgactgttgagctgtaacaagttgtctcaggtgttcaatttcatgttctagttgctttgttttactggtttcacctgttctattaggtgttacatgctgttcatctgttacattgtcgatctgttcatggtgaacagctttgaatgcaccaaaaactcgtaaaagctctgatgtatctatcttttttacaccgttttcatctgtgcatatggacagttttccctttgatatgtaacggtgaacagttgttctacttttgtttgttagtcttgatgcttcactgatagatacaagagccataagaacctcagatccttccgtatttagccagtatgttctctagtgtggttcgttgtttttgcgtgagccatgagaacgaaccattgagatcatacttactttgcatgtcactcaaaaattttgcctcaaaactggtgagctgaatttttgcagttaaagcatcgtgtagtgtttttcttagtccgttatgtaggtaggaatctgatgtaatggttgttggtattttgtcaccattcatttttatctggttgttctcaagttcggttacgagatccatttgtctatctagttcaacttggaaaatcaacgtatcagtcgggcggcctcgcttatcaaccaccaatttcatattgctgtaagtgtttaaatctttacttattggtttcaaaacccattggttaagccttttaaactcatggtagttattttcaagcattaacatgaacttaaattcatcaaggctaatctctatatttgccttgtgagttttcttttgtgttagttcttttaataaccactcataaatcctcatagagtatttgttttcaaaagacttaacatgttccagattatattttatgaatttttttaactggaaaagataaggcaatatctcttcactaaaaactaattctaatttttcgcttgagaacttggcatagtttgtccactggaaaatctcaaagcctttaaccaaaggattcctgatttccacagttctcgtcatcagctctctggttgctttagctaatacaccataagcattttccctactgatgttcatcatctgagcgtattggttataagtgaacgataccgtccgttctttccttgtagggttttcaatcgtggggttgagtagtgccacacagcataaaattagcttggtttcatgctccgttaagtcatagcgactaatcgctagttcatttgctttgaaaacaactaattcagacatacatctcaattggtctaggtgattttaatcactataccaattgagatgggctagtcaatgataattactagtccttttcctttgagttgtgggtatctgtaaattctgctagacctttgctggaaaacttgtaaattctgctagaccctctgtaaattccgctagacctttgtgtgttttttttgtttatattcaagtggttataatttatagaataaagaaagaataaaaaaagataaaaagaatagatcccagccctgtgtataactcactactttagtcagttccgcagtattacaaaaggatgtcgcaaacgctgtttgctcctctacaaaacagaccttaaaaccctaaaggcttaagtagcaccctcgcaagctcgggcaaatcgctgaatattccttttgtctccgaccatcaggcacctgagtcgctgtctttttcgtgacattcagttcgctgcgctcacggctctggcagtgaatgggggtaaatggcactacaggcgccttttatggattcatgcaaggaaactacccataatacaagaaaagcccgtcacgggcttctcagggcgttttatggcgggtctgctatgtggtgctatctgactttttgctgttcagcagttcctgccctctgattttccagtctgaccacttcggattatcccgtgacaggtcattcagactggctaatgcacccagtaaggcagcggtatcatcaacaggcttacccgtcttactgtcttttctacggggtctgacgctcagtggaacgaaaactcacgttaagggattttggtcatgagattatcaaaaaggatcttcacctagatccttttaaattaaaaatgaagttttaaatcaatctaaagtatatatgagtaaacttggtctgacagttaccaatgcttaatcagtgaggcacctatctcagcgatctgtctatttcgttcatccatagttgcctgactccccgtcgtgtagataactacgatacgggagggcttaccatctggccccagtgctgcaatgataccgcgagaaccacgctcaccggctccagatttatcagcaataaaccagccagccggaagggccgagcgcagaagtggtcctgcaactttatccgcctccatccagtctattaattgttgccgggaagctagagtaagtagttcgccagttaatagtttgcgcaacgttgttgccattgctacaggcatcgtggtgtcacgctcgtcgtttggtatggcttcattcagctccggttcccaacgatcaaggcgagttacatgatcccccatgttgtgcaaaaaagcggttagctccttcggtcctccgatcgttgtcagaagtaagttggccgcagtgttatcactcatggttatggcagcactgcataattctcttactgtcatgccatccgtaagatgcttttctgtgactggtgagtactcaaccaagtcattctgagaatagtgtatgcggcgaccgagttgctcttgcccggcgtcaatacgggataataccgcgccacatagcagaactttaaaagtgctcatcattggaaaacgttcttcggggcgaaaactctcaaggatcttaccgctgttgagatccagttcgatgtaacccactcgtgcacccaactgatcttcagcatcttttactttcaccagcgtttctgggtgagcaaaaacaggaaggcaaaatgccgcaaaaaagggaataagggcgacacggaaatgttgaatactcatactcttcctttttcaatattattgaagcatttatcagggttattgtctcatgagcggatacatatttgaatgtatttagaaaaataaacaaataggggttccgcgcacatttccccgaaaagtgccacctgacgtctaagaaaccattattatcatgacattaacctataaaaataggcgtatcacgaggccctttcgtctcgcgcgtttcggtgatgacggtgaaaacctctgacacatgcagctcccggagacggtcacagcttgtctgtaagcggatgccgggagcagacaagcccgtcagggcgcgtcagcgggtgttggcgggtgtcggggctggcttaactatgcggcatcagagcagattgtactgagagtgcaccatatgcggtgtgaaataccgcacagatgcgtaaggagaaaataccgcatcaggcgccattcgccattcaggctgcgcaactgttgggaagggcgatcggtgcgggcctcttcgctattacgccagctggcgaaagggggatgtgctgcaaggcgattaagttgggtaacgccagggttttcccagtcacgacgttgtaaaacgacggccagtgaattcgttaagacccactttcacatttaagttgtttttctaatccgcatatgatcaattcaaggccgaataagaaggctggctctgcaccttggtgatcaaataattcgatagcttgtcgtaataatggcggcatactatcagtagtaggtgtttccctttcttctttagcgacttgatgctcttgatcttccaatacgcaacctaaagtaaaatgccccacagcgctgagtgcatataatgcattctctagtgaaaaaccttgttggcataaaaaggctaattgattttcgagagtttcatactgtttttctgtaggccgtgtacctaaatgtacttttgctccatcgcgatgacttagtaaagcacatctaaaacttttagcgttattacgtaaaaaatcttgccagctttccccttctaaagggcaaaagtgagtatggtgcctatctaacatctcaatggctaaggcgtcgagcaaagcccgcttattttttacatgccaatacaatgtaggctgctctacacctagcttctgggcgagtttacgggttgttaaaccttcgattccgacctcattaagcagctctaatgcgctgttaatcactttacttttatctaatctagacatcattaattcctaatttttgttgacactctatcattgatagagttattttaccactccctatcagtgatagagaaaagtga

SEQ ID NO: 8 - DNA, 10256 bp, Artificial Sequence
  Description of Artificial Sequence: Synthetic polynucleotide
gcgaaaaatcaataaggaggcaacaagatgtgcgaaaaacatcttaatcatgctaaggaggttttctaatgcagatcttcgacactttgcaatcaatgggccatgagcaggttgtcctatgtagcgataagaccacgggtctgcgcgccattatcgctatacacgatacatccttagggccggcgcttggtggtacccgtatgtggcagtatgcaactgacgacgatgctattactgacgcactccgtctgtctcggggcatgacctacaaagctgcggtttctggcgtaaatctgggcggtggtaaagccgttatcatcggaaaccctcacagtgataaaagcgaagcgctgtttcgcgcttacggcagaatggtggaatcccagcgtgggcgttacatcaccgccgaagacgttggtactagcgtacgtgatatggagtggattcgcatggaaaccaaatatgtaacgggcgtgggtggcaacggaggctctggtgacccctctccagttaccgctctgggtgtttactcgggcatgaaggcatgcgctaaatcagtctatggtactgatgcgctgagcggtaaaaggatcgtggttcagggcgcgggtaacgttgcatcccatctggttcacagtctggtaaaagaaggcgctgtggttttcgtcactgacatctacgaagaaaaggccaaagcattagcggctgaaacgggcgctaccgtgattcgcaccgacgaggtttttactacacaatgcgatatcttctctccgaacgctctgggggccgtcctgaacgatgaaactattccgcagctcacatgcgctatcgtagctggtggtgcaaacaatcagcttaaaatcgaacaacgtcacgccacggctctgcaagagaaaggcattctgtatgcgccggattacgtaatcaacgccgggggcctcatgaatgtggcgagcgaagttgacggctacaaccgtgaaaaggttatgcgccaggctgaaggtatttacgatattactatgaacatcctaaataccgcgcgtgagcgtaacatcctgaccatcgaagcatccaacgcgattgctgaagagcggatcaacaaagttcgccatgttcacgggaacttcatcggttccccgtctattcgcggagtataagtcaataaaggcatataaaaggaggttaataacatgaaagttaaagtaaaacatcttaatcatgcacaggagactttctaatgtcgacgacaaccgttggtgactacttgctgtatcgcttaaacgaaatcggcattgagcacctcttcggagtgccaggtgattacaatctgcaatttctggatcatgtaatcgaccaccctcagctgacttgggtcggctgcactaacgaacttaacgctgcctacgcagctgatggttatgcgcgttgtcgtccggctgcggcactgctgaccaccttcggggttggcgaactgagcgctattaatggcatcgcaggttcctacgcggagtatctgccggtaatacatatcgttggtgcaccgagtctatcagcccagcagcagggcgacctgattcaccactctcttggcgaaggtgatttttccagcttcctgaggatgtcccaaccggtgtctgttgcgcaggctgctctgactcctgataacgcatgcaaggaaatcgaccgcgtactggcggaagtcctcattcagcgtcgtcccggctacctgctgctgtctaccgacgtggctgctgcgccggcggctctgccacaaagcactctttctttgccgaccgccccggatcatcgcgcagttctggctgctttcagcgacgctgctgagcagatgctggctcaggccaaaagcgtctctctactggcggactttctggctgatcgtttcggtgttactcgagcactggccgcgtggcttcagcaggttccgctaccgcacgccactctgttaatgggtaaaggcgttctgagtgaacagcaaccagggttcgtgggtacctacgctggtgcggcatctatcgattcgacgcgtggcgcaatcgaagaagctggggtaattatcggagtgggagttagattttccgacactatcacagcaggcttctcgcagcagatcgacgcccgccgttttatagacattcaacccttcttctctcgtattggcgatcgccagtttgatcacttgccgatgcaggctgccgtcgcagccctgcatcaactgtgtcttcgttatcagcagcagtggtctatcaccgctcctagcccgcctgcactgccgccggctgctggtagcgagctgtcccagaacgcattctggcaggcgatgcagaacttcatccgccctggggacctgttggtggccgaccaaggtactgcggcgttcggcgcagcggcgctgcgcttaccgcagaattgccagctgcttgtgcagccgctgtggggctcaatcggttacagtctgccggccacctttggtgctcagacggcagatacagagcgtcgtgtaatcctaatcattggcgatggttcagcgcaattaactattcaggaactttccagtatgatgcgtgacggcttgaaacctatcatctttctcctgaacaacaacggttacaccgttgaacgggcgattcacggcgcggagcaacgttataacgatatcgctgcttggaattggacccaactgccccaggcgctgagtgttcattgcccagcgcagagctggcgagtcgttgaaacggtgcagctgaccgacgtaatgaaagtcatcgctgcttctccgcgtctgagcttggtagaagttgttctgcctgcaatggatgtcccaccgctgctgcaagcagtgagtgccgctctgaaccagcgcaactcctcttaagaccagaggtaaggaggtaacaaccatgcgagtgttgaagaaacatcttaatcatgcaggggagggtttctaatgcgcagcatgcagtttgatgagtacggtgcacccctgaaagcgttctcatatgaagacccgaccccgcaagggaaggaagtagtcgttaggatcgaagcctgtggtgtgtgccactctgatattcatcttcacgagggctacttcgacatgggcggtggcaataaagctgatgttactcgtgctcgcgaactcccttttacattgggtcatgaaatcgttggcgaagtggtagcaactggaccaggtgtcaccggcgctaaaccgggcgacaaacgtattgtgtacccgtggatcgggtgcggcgactgcccgaaatgcaacagtggtgaggatcagtcctgtgcgcgtccacgtaacctgggtgttcacgttgacggtggctattcgacgcacgtaaagataccggacgaaaaattcctgttcgcctacgatggtattcctactgagttagcgggaacctatgcttgcagcggcatcaccgcttatggtgcactgatgaaagcaaaggaagcggctgaaagatctggctacatcggtctgattggcgctggtggcgttggcatggctggtctgatgctggccaaagcagcgatcggggctaaaactgtagtctttgatatcgacgacgcaaaactggaagctgcgacccgtgccggggcggattacgtgttcaactccggtgcaaaagaaacacgcaaggaagttatgaaactaacgaatggtggcctgtctggtgctgttgatttcgttggcagcgataaaagcgctctgtttggaatcaacgccttgggtcagaacggcgtgctggtcataattggactgttcggtggcgctatgactgttccggtacccctgttcccgctgaaagggatcaccgtacgtggctcatacgtaggttccctgcaagagatgagtgatatgatggagttagttcgcgctgggaaagttcctccgatgccggtaaaaactcggccactggacgctgcctgggaaacccttgaggatctacgccatggtaaaatcgtgggccgtgttgttctgaccccataagaaggagatatacatatgacccatcaattaagatcgcgcgatatcatcgctctgggctttatgacatttgcgttgttcgtcggcgcaggtaacattattttccctccaatggtcggcttgcaggcaggcgaacacgtctggactgcggcattcggcttcctcattactgccgttggcctaccggtattaacggtagtggcgctggcaaaagttggcggcggtgttgacagtctcagcacgccaattggtaaagtcgctggcgtactgctggcaacagtttgttacctggcggtggggccgctttttgctacgccgcgtacagctaccgtttcttttgaagtgggcattgcgccgctgacgggtgattccgcgctgccgctgtttatttacagcctggtctatttcgctatcgttattctggtttcgctctatccgggcaagctgctggataccgtgggcaacttccttgcgccgctgaaaattatcgcgctggtcatcctgtctgttgccgcaattatctggccggcgggttctatcagtacggcgactgaggcttatcaaaacgctgcgttttctaacggcttcgtcaacggctatctgaccatggatacgctgggcgcaatggtgtttggtatcgttattgttaacgcggcgcgttctcgtggcgttaccgaagcgcgtctgctgacccgttataccgtctgggctggcctgatggcgggtgttggtctgactctgctgtacctggcgctgttccgtctgggttcagacagcgcgtcgctggtcgatcagtctgcaaacggtgcggcgatcctgcatgcttacgttcagcatacctttggcggcggcggtagcttcctgctggcggcgttaatcttcatcgcctgcctggtcacggcggttggcctgacctgtgcttgtgcagaattcttcgcccagtacgtaccgctctcttatcgtacgctggtgtttatcctcggcggcttctcgatggtggtgtctaacctcggcttgagccagctgattcagatctctgtaccggtgctgaccgccatttatccgccgtgtatcgcactggttgtattaagttttacacgctcatggtggcataattcgtcccgcgtgattgctccgccgatgtttatcagcctgctttttggtattctcgacgggatcaaggcatctgcattcagcgatatcttaccgtcctgggcgcagcgtttaccgctggccgaacaaggtctggcgtggttaatgccaacagtggtgatggtggttctggccattatctgggatcgtgcggcaggtcgtcaggtgacctccagcgctcactaatacgcatggcatggatgaccgatggtagtgtgggctctccccatgcgagagtagggaactgccaggcatcaaataaaacgaaaggctcagtcgaaagactgggcctttcgttttatctgttgtttgtcggtgaacgctctcctgagtaggacaaatccgccgggagcggatttgaacgttgcgaagcaacggcccggagggtggcgggcaggacgcccgccataaactgccaggcatcaaattaagcagaaggccatcctgacggatggcctttttgcgtggccagtgccaagcttgcatgcgtgccagctgcattaatgaagaaatcatgctggaagaataacagctcactcaaaggcggtagtacgggttttgctgcccgcaaacgggctgttctggtgttgctagtttgttatcagaatcgcagatccggcttcagccggtttgccggctgaaagcgctatttcttccagaattgccatgattttttccccacgggaggcgtcactggctcccgtgttgtcggcagctttgattcgataagcagcatcgcctgtttcaggctgtctatgtgtgactgttgagctgtaacaagttgtctcaggtgttcaatttcatgttctagttgctttgttttactggtttcacctgttctattaggtgttacatgctgttcatctgttacattgtcgatctgttcatggtgaacagctttgaatgcaccaaaaactcgtaaaagctctgatgtatctatcttttttacaccgttttcatctgtgcatatggacagttttccctttgatatgtaacggtgaacagttgttctacttttgtttgttagtcttgatgcttcactgatagatacaagagccataagaacctcagatccttccgtatttagccagtatgttctctagtgtggttcgttgtttttgcgtgagccatgagaacgaaccattgagatcatacttactttgcatgtcactcaaaaattttgcctcaaaactggtgagctgaatttttgcagttaaagcatcgtgtagtgtttttcttagtccgttatgtaggtaggaatctgatgtaatggttgttggtattttgtcaccattcatttttatctggttgttctcaagttcggttacgagatccatttgtctatctagttcaacttggaaaatcaacgtatcagtcgggcggcctcgcttatcaaccaccaatttcatattgctgtaagtgtttaaatctttacttattggtttcaaaacccattggttaagccttttaaactcatggtagttattttcaagcattaacatgaacttaaattcatcaaggctaatctctatatttgccttgtgagttttcttttgtgttagttcttttaataaccactcataaatcctcatagagtatttgttttcaaaagacttaacatgttccagattatattttatgaatttttttaactggaaaagataaggcaatatctcttcactaaaaactaattctaatttttcgcttgagaacttggcatagtttgtccactggaaaatctcaaagcctttaaccaaaggattcctgatttccacagttctcgtcatcagctctctggttgctttagctaatacaccataagcattttccctactgatgttcatcatctgagcgtattggttataagtgaacgataccgtccgttctttccttgtagggttttcaatcgtggggttgagtagtgccacacagcataaaattagcttggtttcatgctccgttaagtcatagcgactaatcgctagttcatttgctttgaaaacaactaattcagacatacatctcaattggtctaggtgattttaatcactataccaattgagatgggctagtcaatgataattactagtccttttcctttgagttgtgggtatctgtaaattctgctagacctttgctggaaaacttgtaaattctgctagaccctctgtaaattccgctagacctttgtgtgttttttttgtttatattcaagtggttataatttatagaataaagaaagaataaaaaaagataaaaagaatagatcccagccctgtgtataactcactactttagtcagttccgcagtattacaaaaggatgtcgcaaacgctgtttgctcctctacaaaacagaccttaaaaccctaaaggcttaagtagcaccctcgcaagctcgggcaaatcgctgaatattccttttgtctccgaccatcaggcacctgagtcgctgtctttttcgtgacattcagttcgctgcgctcacggctctggcagtgaatgggggtaaatggcactacaggcgccttttatggattcatgcaaggaaactacccataatacaagaaaagcccgtcacgggcttctcagggcgttttatggcgggtctgctatgtggtgctatctgactttttgctgttcagcagttcctgccctctgattttccagtctgaccacttcggattatcccgtgacaggtcattcagactggctaatgcacccagtaaggcagcggtatcatcaacaggcttacccgtcttactgtcttttctacggggtctgacgctcagtggaacgaaaactcacgttaagggattttggtcatgagattatcaaaaaggatcttcacctagatccttttaaattaaaaatgaagttttaaatcaatctaaagtatatatgagtaaacttggtctgacagttaccaatgcttaatcagtgaggcacctatctcagcgatctgtctatttcgttcatccatagttgcctgactccccgtcgtgtagataactacgatacgggagggcttaccatctggccccagtgctgcaatgataccgcgagaaccacgctcaccggctccagatttatcagcaataaaccagccagccggaagggccgagcgcagaagtggtcctgcaactttatccgcctccatccagtctattaattgttgccgggaagctagagtaagtagttcgccagttaatagtttgcgcaacgttgttgccattgctacaggcatcgtggtgtcacgctcgtcgtttggtatggcttcattcagctccggttcccaacgatcaaggcgagttacatgatcccccatgttgtgcaaaaaagcggttagctccttcggtcctccgatcgttgtcagaagtaagttggccgcagtgttatcactcatggttatggcagcactgcataattctcttactgtcatgccatccgtaagatgcttttctgtgactggtgagtactcaaccaagtcattctgagaatagtgtatgcggcgaccgagttgctcttgcccggcgtcaatacgggataataccgcgccacatagcagaactttaaaagtgctcatcattggaaaacgttcttcggggcgaaaactctcaaggatcttaccgctgttgagatccagttcgatgtaacccactcgtgcacccaactgatcttcagcatcttttactttcaccagcgtttctgggtgagcaaaaacaggaaggcaaaatgccgcaaaaaagggaataagggcgacacggaaatgttgaatactcatactcttcctttttcaatattattgaagcatttatcagggttattgtctcatgagcggatacatatttgaatgtatttagaaaaataaacaaataggggttccgcgcacatttccccgaaaagtgccacctgacgtctaagaaaccattattatcatgacattaacctataaaaataggcgtatcacgaggccctttcgtctcgcgcgtttcggtgatgacggtgaaaacctctgacacatgcagctcccggagacggtcacagcttgtctgtaagcggatgccgggagcagacaagcccgtcagggcgcgtcagcgggtgttggcgggtgtcggggctggcttaactatgcggcatcagagcagattgtactgagagtgcaccatatgcggtgtgaaataccgcacagatgcgtaaggagaaaataccgcatcaggcgccattcgccattcaggctgcgcaactgttgggaagggcgatcggtgcgggcctcttcgctattacgccagctggcgaaagggggatgtgctgcaaggcgattaagttgggtaacgccagggttttcccagtcacgacgttgtaaaacgacggccagtgaattcgttaagacccactttcacatttaagttgtttttctaatccgcatatgatcaattcaaggccgaataagaaggctggctctgcaccttggtgatcaaataattcgatagcttgtcgtaataatggcggcatactatcagtagtaggtgtttccctttcttctttagcgacttgatgctcttgatcttccaatacgcaacctaaagtaaaatgccccacagcgctgagtgcatataatgcattctctagtgaaaaaccttgttggcataaaaaggctaattgattttcgagagtttcatactgtttttctgtaggccgtgtacctaaatgtacttttgctccatcgcgatgacttagtaaagcacatctaaaacttttagcgttattacgtaaaaaatcttgccagctttccccttctaaagggcaaaagtgagtatggtgcctatctaacatctcaatggctaaggcgtcgagcaaagcccgcttattttttacatgccaatacaatgtaggctgctctacacctagcttctgggcgagtttacgggttgttaaaccttcgattccgacctcattaagcagctctaatgcgctgttaatcactttacttttatctaatctagacatcattaattcctaatttttgttgacactctatcattgatagagttattttaccactccctatcagtgatagagaaaagtga

SEQ ID NO: 9 - DNA, 10110 bp, Artificial Sequence
  Description of Artificial Sequence: Synthetic polynucleotide
gataaacgaatcacaaaggcgaggcaagatgaacatcttcaagaaaatggaggaatttaattatgaacaactggtctacttctacgacagcgaaacggaactcaaaggtattacctgtatacacaacacaactttagggccggcattgggcggtacccgcctttggaactataactctgaggaagatgccgttgaagacgtaatccgtctggctcggggcatgacttacaaagcggcttgcgccggtctgaatctgggcggcggtaaaaccgtgctgatcggtgatgctaaaaagattaaatcagagtcctacttccgtggactggggcgctacgttcagtcgctgaacggcagatatatcaccgcggaagacgtaaatacttctacgaaggatatggcatacgttgctatggaaactgactatgtggtaggcctgggaggtaaatccggcaaccctagtccagttactgcttacggtgcatttatgggtatcaaagcggcgctgatgaaaaaatttgaggatagctctattgaaggccgaaccttcgcagtgcagggtgctgggcagacgggttactatcttatcgattacctcctaggcaacaacaagttcaaagaaaaggctaaaaagatttacttcaccgaaattaacgagagctatatcgagcgtatgaacaaagaacatccggaagttgaatttatttccccggacaaaatctactcgctggaagtagacgtcttcgtgccctgcgccctgggcaaaatcgttaatgacaaaactatcgatgaatttaagtgtccgatcatcgcaggtactgcaaacaacgtactggaaagggaagcgcacggcaacatgcttaaagaacgtggcattctttacgccccggactatgtgatcaatgctggtgggctgatcaacgtttaccacgagctgaacggttacaataaagagaacgctattctggaagtggaattaatttatgatcgcctactggaaatattcaacatcgctgattctctgaacatcagcaccaatatcgctgccaacgagttcgcggaaaaacgtatcaagcaaattaagtccttgaaaaacaacttcattaaacgctaagaccattaataaggaacattttatgtcgacgacaaccgttggtgactacttgctgtatcgcttaaacgaaatcggcattgagcacctcttcggagtgccaggtgattacaatctgcaatttctggatcatgtaatcgaccaccctcagctgacttgggtcggctgcactaacgaacttaacgctgcctacgcagctgatggttatgcgcgttgtcgtccggctgcggcactgctgaccaccttcggggttggcgaactgagcgctattaatggcatcgcaggttcctacgcggagtatctgccggtaatacatatcgttggtgcaccgagtctatcagcccagcagcagggcgacctgattcaccactctcttggcgaaggtgatttttccagcttcctgaggatgtcccaaccggtgtctgttgcgcaggctgctctgactcctgataacgcatgcaaggaaatcgaccgcgtactggcggaagtcctcattcagcgtcgtcccggctacctgctgctgtctaccgacgtggctgctgcgccggcggctctgccacaaagcactctttctttgccgaccgccccggatcatcgcgcagttctggctgctttcagcgacgctgctgagcagatgctggctcaggccaaaagcgtctctctactggcggactttctggctgatcgtttcggtgttactcgagcactggccgcgtggcttcagcaggttccgctaccgcacgccactctgttaatgggtaaaggcgttctgagtgaacagcaaccagggttcgtgggtacctacgctggtgcggcatctatcgattcgacgcgtggcgcaatcgaagaagctggggtaattatcggagtgggagttagattttccgacactatcacagcaggcttctcgcagcagatcgacgcccgccgttttatagacattcaacccttcttctctcgtattggcgatcgccagtttgatcacttgccgatgcaggctgccgtcgcagccctgcatcaactgtgtcttcgttatcagcagcagtggtctatcaccgctcctagcccgcctgcactgccgccggctgctggtagcgagctgtcccagaacgcattctggcaggcgatgcagaacttcatccgccctggggacctgttggtggccgaccaaggtactgcggcgttcggcgcagcggcgctgcgcttaccgcagaattgccagctgcttgtgcagccgctgtggggctcaatcggttacagtctgccggccacctttggtgctcagacggcagatacagagcgtcgtgtaatcctaatcattggcgatggttcagcgcaattaactattcaggaactttccagtatgatgcgtgacggcttgaaacctatcatctttctcctgaacaacaacggttacaccgttgaacgggcgattcacggcgcggagcaacgttataacgatatcgctgcttggaattggacccaactgccccaggcgctgagtgttcattgcccagcgcagagctggcgagtcgttgaaacggtgcagctgaccgacgtaatgaaagtcatcgctgcttctccgcgtctgagcttggtagaagttgttctgcctgcaatggatgtcccaccgctgctgcaagcagtgagtgccgctctgaaccagcgcaactcctcttaatccctccctacgggttaaggagcccctgctatgcgcagcatgcagtttgatgagtacggtgcacccctgaaagcgttctcatatgaagacccgaccccgcaagggaaggaagtagtcgttaggatcgaagcctgtggtgtgtgccactctgatattcatcttcacgagggctacttcgacatgggcggtggcaataaagctgatgttactcgtgctcgcgaactcccttttacattgggtcatgaaatcgttggcgaagtggtagcaactggaccaggtgtcaccggcgctaaaccgggcgacaaacgtattgtgtacccgtggatcgggtgcggcgactgcccgaaatgcaacagtggtgaggatcagtcctgtgcgcgtccacgtaacctgggtgttcacgttgacggtggctattcgacgcacgtaaagataccggacgaaaaattcctgttcgcctacgatggtattcctactgagttagcgggaacctatgcttgcagcggcatcaccgcttatggtgcactgatgaaagcaaaggaagcggctgaaagatctggctacatcggtctgattggcgctggtggcgttggcatggctggtctgatgctggccaaagcagcgatcggggctaaaactgtagtctttgatatcgacgacgcaaaactggaagctgcgacccgtgccggggcggattacgtgttcaactccggtgcaaaagaaacacgcaaggaagttatgaaactaacgaatggtggcctgtctggtgctgttgatttcgttggcagcgataaaagcgctctgtttggaatcaacgccttgggtcagaacggcgtgctggtcataattggactgttcggtggcgctatgactgttccggtacccctgttcccgctgaaagggatcaccgtacgtggctcatacgtaggttccctgcaagagatgagtgatatgatggagttagttcgcgctgggaaagttcctccgatgccggtaaaaactcggccactggacgctgcctgggaaacccttgaggatctacgccatggtaaaatcgtgggccgtgttgttctgaccccataagaaggagatatacatatgacccatcaattaagatcgcgcgatatcatcgctctgggctttatgacatttgcgttgttcgtcggcgcaggtaacattattttccctccaatggtcggcttgcaggcaggcgaacacgtctggactgcggcattcggcttcctcattactgccgttggcctaccggtattaacggtagtggcgctggcaaaagttggcggcggtgttgacagtctcagcacgccaattggtaaagtcgctggcgtactgctggcaacagtttgttacctggcggtggggccgctttttgctacgccgcgtacagctaccgtttcttttgaagtgggcattgcgccgctgacgggtgattccgcgctgccgctgtttatttacagcctggtctatttcgctatcgttattctggtttcgctctatccgggcaagctgctggataccgtgggcaacttccttgcgccgctgaaaattatcgcgctggtcatcctgtctgttgccgcaattatctggccggcgggttctatcagtacggcgactgaggcttatcaaaacgctgcgttttctaacggcttcgtcaacggctatctgaccatggatacgctgggcgcaatggtgtttggtatcgttattgttaacgcggcgcgttctcgtggcgttaccgaagcgcgtctgctgacccgttataccgtctgggctggcctgatggcgggtgttggtctgactctgctgtacctggcgctgttccgtctgggttcagacagcgcgtcgctggtcgatcagtctgcaaacggtgcggcgatcctgcatgcttacgttcagcatacctttggcggcggcggtagcttcctgctggcggcgttaatcttcatcgcctgcctggtcacggcggttggcctgacctgtgcttgtgcagaattcttcgcccagtacgtaccgctctcttatcgtacgctggtgtttatcctcggcggcttctcgatggtggtgtctaacctcggcttgagccagctgattcagatctctgtaccggtgctgaccgccatttatccgccgtgtatcgcactggttgtattaagttttacacgctcatggtggcataattcgtcccgcgtgattgctccgccgatgtttatcagcctgctttttggtattctcgacgggatcaaggcatctgcattcagcgatatcttaccgtcctgggcgcagcgtttaccgctggccgaacaaggtctggcgtggttaatgccaacagtggtgatggtggttctggccattatctgggatcgtgcggcaggtcgtcaggtgacctccagcgctcactaatacgcatggcatggatgaccgatggtagtgtgggctctccccatgcgagagtagggaactgccaggcatcaaataaaacgaaaggctcagtcgaaagactgggcctttcgttttatctgttgtttgtcggtgaacgctctcctgagtaggacaaatccgccgggagcggatttgaacgttgcgaagcaacggcccggagggtggcgggcaggacgcccgccataaactgccaggcatcaaattaagcagaaggccatcctgacggatggcctttttgcgtggccagtgccaagcttgcatgcgtgccagctgcattaatgaagaaatcatgctggaagaataacagctcactcaaaggcggtagtacgggttttgctgcccgcaaacgggctgttctggtgttgctagtttgttatcagaatcgcagatccggcttcagccggtttgccggctgaaagcgctatttcttccagaattgccatgattttttccccacgggaggcgtcactggctcccgtgttgtcggcagctttgattcgataagcagcatcgcctgtttcaggctgtctatgtgtgactgttgagctgtaacaagttgtctcaggtgttcaatttcatgttctagttgctttgttttactggtttcacctgttctattaggtgttacatgctgttcatctgttacattgtcgatctgttcatggtgaacagctttgaatgcaccaaaaactcgtaaaagctctgatgtatctatcttttttacaccgttttcatctgtgcatatggacagttttccctttgatatgtaacggtgaacagttgttctacttttgtttgttagtcttgatgcttcactgatagatacaagagccataagaacctcagatccttccgtatttagccagtatgttctctagtgtggttcgttgtttttgcgtgagccatgagaacgaaccattgagatcatacttactttgcatgtcactcaaaaattttgcctcaaaactggtgagctgaatttttgcagttaaagcatcgtgtagtgtttttcttagtccgttatgtaggtaggaatctgatgtaatggttgttggtattttgtcaccattcatttttatctggttgttctcaagttcggttacgagatccatttgtctatctagttcaacttggaaaatcaacgtatcagtcgggcggcctcgcttatcaaccaccaatttcatattgctgtaagtgtttaaatctttacttattggtttcaaaacccattggttaagccttttaaactcatggtagttattttcaagcattaacatgaacttaaattcatcaaggctaatctctatatttgccttgtgagttttcttttgtgttagttcttttaataaccactcataaatcctcatagagtatttgttttcaaaagacttaacatgttccagattatattttatgaatttttttaactggaaaagataaggcaatatctcttcactaaaaactaattctaatttttcgcttgagaacttggcatagtttgtccactggaaaatctcaaagcctttaaccaaaggattcctgatttccacagttctcgtcatcagctctctggttgctttagctaatacaccataagcattttccctactgatgttcatcatctgagcgtattggttataagtgaacgataccgtccgttctttccttgtagggttttcaatcgtggggttgagtagtgccacacagcataaaattagcttggtttcatgctccgttaagtcatagcgactaatcgctagttcatttgctttgaaaacaactaattcagacatacatctcaattggtctaggtgattttaatcactataccaattgagatgggctagtcaatgataattactagtccttttcctttgagttgtgggtatctgtaaattctgctagacctttgctggaaaacttgtaaattctgctagaccctctgtaaattccgctagacctttgtgtgttttttttgtttatattcaagtggttataatttatagaataaagaaagaataaaaaaagataaaaagaatagatcccagccctgtgtataactcactactttagtcagttccgcagtattacaaaaggatgtcgcaaacgctgtttgctcctctacaaaacagaccttaaaaccctaaaggcttaagtagcaccctcgcaagctcgggcaaatcgctgaatattccttttgtctccgaccatcaggcacctgagtcgctgtctttttcgtgacattcagttcgctgcgctcacggctctggcagtgaatgggggtaaatggcactacaggcgccttttatggattcatgcaaggaaactacccataatacaagaaaagcccgtcacgggcttctcagggcgttttatggcgggtctgctatgtggtgctatctgactttttgctgttcagcagttcctgccctctgattttccagtctgaccacttcggattatcccgtgacaggtcattcagactggctaatgcacccagtaaggcagcggtatcatcaacaggcttacccgtcttactgtcttttctacggggtctgacgctcagtggaacgaaaactcacgttaagggattttggtcatgagattatcaaaaaggatcttcacctagatccttttaaattaaaaatgaagttttaaatcaatctaaagtatatatgagtaaacttggtctgacagttaccaatgcttaatcagtgaggcacctatctcagcgatctgtctatttcgttcatccatagttgcctgactccccgtcgtgtagataactacgatacgggagggcttaccatctggccccagtgctgcaatgataccgcgagaaccacgctcaccggctccagatttatcagcaataaaccagccagccggaagggccgagcgcagaagtggtcctgcaactttatccgcctccatccagtctattaattgttgccgggaagctagagtaagtagttcgccagttaatagtttgcgcaacgttgttgccattgctacaggcatcgtggtgtcacgctcgtcgtttggtatggcttcattcagctccggttcccaacgatcaaggcgagttacatgatcccccatgttgtgcaaaaaagcggttagctccttcggtcctccgatcgttgtcagaagtaagttggccgcagtgttatcactcatggttatggcagcactgcataattctcttactgtcatgccatccgtaagatgcttttctgtgactggtgagtactcaaccaagtcattctgagaatagtgtatgcggcgaccgagttgctcttgcccggcgtcaatacgggataataccgcgccacatagcagaactttaaaagtgctcatcattggaaaacgttcttcggggcgaaaactctcaaggatcttaccgctgttgagatccagttcgatgtaacccactcgtgcacccaactgatcttcagcatcttttactttcaccagcgtttctgggtgagcaaaaacaggaaggcaaaatgccgcaaaaaagggaataagggcgacacggaaatgttgaatactcatactcttcctttttcaatattattgaagcatttatcagggttattgtctcatgagcggatacatatttgaatgtatttagaaaaataaacaaataggggttccgcgcacatttccccgaaaagtgccacctgacgtctaagaaaccattattatcatgacattaacctataaaaataggcgtatcacgaggccctttcgtctcgcgcgtttcggtgatgacggtgaaaacctctgacacatgcagctcccggagacggtcacagcttgtctgtaagcggatgccgggagcagacaagcccgtcagggcgcgtcagcgggtgttggcgggtgtcggggctggcttaactatgcggcatcagagcagattgtactgagagtgcaccatatgcggtgtgaaataccgcacagatgcgtaaggagaaaataccgcatcaggcgccattcgccattcaggctgcgcaactgttgggaagggcgatcggtgcgggcctcttcgctattacgccagctggcgaaagggggatgtgctgcaaggcgattaagttgggtaacgccagggttttcccagtcacgacgttgtaaaacgacggccagtgaattcgttaagacccactttcacatttaagttgtttttctaatccgcatatgatcaattcaaggccgaataagaaggctggctctgcaccttggtgatcaaataattcgatagcttgtcgtaataatggcggcatactatcagtagtaggtgtttccctttcttctttagcgacttgatgctcttgatcttccaatacgcaacctaaagtaaaatgccccacagcgctgagtgcatataatgcattctctagtgaaaaaccttgttggcataaaaaggctaattgattttcgagagtttcatactgtttttctgtaggccgtgtacctaaatgtacttttgctccatcgcgatgacttagtaaagcacatctaaaacttttagcgttattacgtaaaaaatcttgccagctttccccttctaaagggcaaaagtgagtatggtgcctatctaacatctcaatggctaaggcgtcgagcaaagcccgcttattttttacatgccaatacaatgtaggctgctctacacctagcttctgggcgagtttacgggttgttaaaccttcgattccgacctcattaagcagctctaatgcgctgttaatcactttacttttatctaatctagacatcattaattcctaatttttgttgacactctatcattgatagagttattttaccactccctatcagtgatagagaaaagtga

SEQ ID NO: 10 - DNA, 10108 bp, Artificial Sequence
  Description of Artificial Sequence: Synthetic polynucleotide
gagctagataataaggacggcacaagatgaacatcttcaagaaaatggaggaatttaattatgaacaactggtctacttctacgacagcgaaacggaactcaaaggtattacctgtatacacaacacaactttagggccggcattgggcggtacccgcctttggaactataactctgaggaagatgccgttgaagacgtaatccgtctggctcggggcatgacttacaaagcggcttgcgccggtctgaatctgggcggcggtaaaaccgtgctgatcggtgatgctaaaaagattaaatcagagtcctacttccgtggactggggcgctacgttcagtcgctgaacggcagatatatcaccgcggaagacgtaaatacttctacgaaggatatggcatacgttgctatggaaactgactatgtggtaggcctgggaggtaaatccggcaaccctagtccagttactgcttacggtgcatttatgggtatcaaagcggcgctgatgaaaaaatttgaggatagctctattgaaggccgaaccttcgcagtgcagggtgctgggcagacgggttactatcttatcgattacctcctaggcaacaacaagttcaaagaaaaggctaaaaagatttacttcaccgaaattaacgagagctatatcgagcgtatgaacaaagaacatccggaagttgaatttatttccccggacaaaatctactcgctggaagtagacgtcttcgtgccctgcgccctgggcaaaatcgttaatgacaaaactatcgatgaatttaagtgtccgatcatcgcaggtactgcaaacaacgtactggaaagggaagcgcacggcaacatgcttaaagaacgtggcattctttacgccccggactatgtgatcaatgctggtgggctgatcaacgtttaccacgagctgaacggttacaataaagagaacgctattctggaagtggaattaatttatgatcgcctactggaaatattcaacatcgctgattctctgaacatcagcaccaatatcgctgccaacgagttcgcggaaaaacgtatcaagcaaattaagtccttgaaaaacaacttcattaaacgctaagaccattaataaggaacattttatgtcgacgacaaccgttggtgactacttgctgtatcgcttaaacgaaatcggcattgagcacctcttcggagtgccaggtgattacaatctgcaatttctggatcatgtaatcgaccaccctcagctgacttgggtcggctgcactaacgaacttaacgctgcctacgcagctgatggttatgcgcgttgtcgtccggctgcggcactgctgaccaccttcggggttggcgaactgagcgctattaatggcatcgcaggttcctacgcggagtatctgccggtaatacatatcgttggtgcaccgagtctatcagcccagcagcagggcgacctgattcaccactctcttggcgaaggtgatttttccagcttcctgaggatgtcccaaccggtgtctgttgcgcaggctgctctgactcctgataacgcatgcaaggaaatcgaccgcgtactggcggaagtcctcattcagcgtcgtcccggctacctgctgctgtctaccgacgtggctgctgcgccggcggctctgccacaaagcactctttctttgccgaccgccccggatcatcgcgcagttctggctgctttcagcgacgctgctgagcagatgctggctcaggccaaaagcgtctctctactggcggactttctggctgatcgtttcggtgttactcgagcactggccgcgtggcttcagcaggttccgctaccgcacgccactctgttaatgggtaaaggcgttctgagtgaacagcaaccagggttcgtgggtacctacgctggtgcggcatctatcgattcgacgcgtggcgcaatcgaagaagctggggtaattatcggagtgggagttagattttccgacactatcacagcaggcttctcgcagcagatcgacgcccgccgttttatagacattcaacccttcttctctcgtattggcgatcgccagtttgatcacttgccgatgcaggctgccgtcgcagccctgcatcaactgtgtcttcgttatcagcagcagtggtctatcaccgctcctagcccgcctgcactgccgccggctgctggtagcgagctgtcccagaacgcattctggcaggcgatgcagaacttcatccgccctggggacctgttggtggccgaccaaggtactgcggcgttcggcgcagcggcgctgcgcttaccgcagaattgccagctgcttgtgcagccgctgtggggctcaatcggttacagtctgccggccacctttggtgctcagacggcagatacagagcgtcgtgtaatcctaatcattggcgatggttcagcgcaattaactattcaggaactttccagtatgatgcgtgacggcttgaaacctatcatctttctcctgaacaacaacggttacaccgttgaacgggcgattcacggcgcggagcaacgttataacgatatcgctgcttggaattggacccaactgccccaggcgctgagtgttcattgcccagcgcagagctggcgagtcgttgaaacggtgcagctgaccgacgtaatgaaagtcatcgctgcttctccgcgtctgagcttggtagaagttgttctgcctgcaatggatgtcccaccgctgctgcaagcagtgagtgccgctctgaaccagcgcaactcctcttaatccctccctacgggttaaggagcccctgctatgcgcagcatgcagtttgatgagtacggtgcacccctgaaagcgttctcatatgaagacccgaccccgcaagggaaggaagtagtcgttaggatcgaagcctgtggtgtgtgccactctgatattcatcttcacgagggctacttcgacatgggcggtggcaataaagctgatgttactcgtgctcgcgaactcccttttacattgggtcatgaaatcgttggcgaagtggtagcaactggaccaggtgtcaccggcgctaaaccgggcgacaaacgtattgtgtacccgtggatcgggtgcggcgactgcccgaaatgcaacagtggtgaggatcagtcctgtgcgcgtccacgtaacctgggtgttcacgttgacggtggctattcgacgcacgtaaagataccggacgaaaaattcctgttcgcctacgatggtattcctactgagttagcgggaacctatgcttgcagcggcatcaccgcttatggtgcactgatgaaagcaaaggaagcggctgaaagatctggctacatcggtctgattggcgctggtggcgttggcatggctggtctgatgctggccaaagcagcgatcggggctaaaactgtagtctttgatatcgacgacgcaaaactggaagctgcgacccgtgccggggcggattacgtgttcaactccggtgcaaaagaaacacgcaaggaagttatgaaactaacgaatggtggcctgtctggtgctgttgatttcgttggcagcgataaaagcgctctgtttggaatcaacgccttgggtcagaacggcgtgctggtcataattggactgttcggtggcgctatgactgttccggtacccctgttcccgctgaaagggatcaccgtacgtggctcatacgtaggttccctgcaagagatgagtgatatgatggagttagttcgcgctgggaaagttcctccgatgccggtaaaaactcggccactggacgctgcctgggaaacccttgaggatctacgccatggtaaaatcgtgggccgtgttgttctgaccccataagaaggagatatacatatgacccatcaattaagatcgcgcgatatcatcgctctgggctttatgacatttgcgttgttcgtcggcgcaggtaacattattttccctccaatggtcggcttgcaggcaggcgaacacgtctggactgcggcattcggcttcctcattactgccgttggcctaccggtattaacggtagtggcgctggcaaaagttggcggcggtgttgacagtctcagcacgccaattggtaaagtcgctggcgtactgctggcaacagtttgttacctggcggtggggccgctttttgctacgccgcgtacagctaccgtttcttttgaagtgggcattgcgccgctgacgggtgattccgcgctgccgctgtttatttacagcctggtctatttcgctatcgttattctggtttcgctctatccgggcaagctgctggataccgtgggcaacttccttgcgccgctgaaaattatcgcgctggtcatcctgtctgttgccgcaattatctggccggcgggttctatcagtacggcgactgaggcttatcaaaacgctgcgttttctaacggcttcgtcaacggctatctgaccatggatacgctgggcgcaatggtgtttggtatcgttattgttaacgcggcgcgttctcgtggcgttaccgaagcgcgtctgctgacccgttataccgtctgggctggcctgatggcgggtgttggtctgactctgctgtacctggcgctgttccgtctgggttcagacagcgcgtcgctggtcgatcagtctgcaaacggtgcggcgatcctgcatgcttacgttcagcatacctttggcggcggcggtagcttcctgctggcggcgttaatcttcatcgcctgcctggtcacggcggttggcctgacctgtgcttgtgcagaattcttcgcccagtacgtaccgctctcttatcgtacgctggtgtttatcctcggcggcttctcgatggtggtgtctaacctcggcttgagccagctgattcagatctctgtaccggtgctgaccgccatttatccgccgtgtatcgcactggttgtattaagttttacacgctcatggtggcataattcgtcccgcgtgattgctccgccgatgtttatcagcctgctttttggtattctcgacgggatcaaggcatctgcattcagcgatatcttaccgtcctgggcgcagcgtttaccgctggccgaacaaggtctggcgtggttaatgccaacagtggtgatggtggttctggccattatctgggatcgtgcggcaggtcgtcaggtgacctccagcgctcactaatacgcatggcatggatgaccgatggtagtgtgggctctccccatgcgagagtagggaactgccaggcatcaaataaaacgaaaggctcagtcgaaagactgggcctttcgttttatctgttgtttgtcggtgaacgctctcctgagtaggacaaatccgccgggagcggatttgaacgttgcgaagcaacggcccggagggtggcgggcaggacgcccgccataaactgccaggcatcaaattaagcagaaggccatcctgacggatggcctttttgcgtggccagtgccaagcttgcatgcgtgccagctgcattaatgaagaaatcatgctggaagaataacagctcactcaaaggcggtagtacgggttttgctgcccgcaaacgggctgttctggtgttgctagtttgttatcagaatcgcagatccggcttcagccggtttgccggctgaaagcgctatttcttccagaattgccatgattttttccccacgggaggcgtcactggctcccgtgttgtcggcagctttgattcgataagcagcatcgcctgtttcaggctgtctatgtgtgactgttgagctgtaacaagttgtctcaggtgttcaatttcatgttctagttgctttgttttactggtttcacctgttctattaggtgttacatgctgttcatctgttacattgtcgatctgttcatggtgaacagctttgaatgcaccaaaaactcgtaaaagctctgatgtatctatcttttttacaccgttttcatctgtgcatatggacagttttccctttgatatgtaacggtgaacagttgttctacttttgtttgttagtcttgatgcttcactgatagatacaagagccataagaacctcagatccttccgtatttagccagtatgttctctagtgtggttcgttgtttttgcgtgagccatgagaacgaaccattgagatcatacttactttgcatgtcactcaaaaattttgcctcaaaactggtgagctgaatttttgcagttaaagcatcgtgtagtgtttttcttagtccgttatgtaggtaggaatctgatgtaatggttgttggtattttgtcaccattcatttttatctggttgttctcaagttcggttacgagatccatttgtctatctagttcaacttggaaaatcaacgtatcagtcgggcggcctcgcttatcaaccaccaatttcatattgctgtaagtgtttaaatctttacttattggtttcaaaacccattggttaagccttttaaactcatggtagttattttcaagcattaacatgaacttaaattcatcaaggctaatctctatatttgccttgtgagttttcttttgtgttagttcttttaataaccactcataaatcctcatagagtatttgttttcaaaagacttaacatgttccagattatattttatgaatttttttaactggaaaagataaggcaatatctcttcactaaaaactaattctaatttttcgcttgagaacttggcatagtttgtccactggaaaatctcaaagcctttaaccaaaggattcctgatttccacagttctcgtcatcagctctctggttgctttagctaatacaccataagcattttccctactgatgttcatcatctgagcgtattggttataagtgaacgataccgtccgttctttccttgtagggttttcaatcgtggggttgagtagtgccacacagcataaaattagcttggtttcatgctccgttaagtcatagcgactaatcgctagttcatttgctttgaaaacaactaattcagacatacatctcaattggtctaggtgattttaatcactataccaattgagatgggctagtcaatgataattactagtccttttcctttgagttgtgggtatctgtaaattctgctagacctttgctggaaaacttgtaaattctgctagaccctctgtaaattccgctagacctttgtgtgttttttttgtttatattcaagtggttataatttatagaataaagaaagaataaaaaaagataaaaagaatagatcccagccctgtgtataactcactactttagtcagttccgcagtattacaaaaggatgtcgcaaacgctgtttgctcctctacaaaacagaccttaaaaccctaaaggcttaagtagcaccctcgcaagctcgggcaaatcgctgaatattccttttgtctccgaccatcaggcacctgagtcgctgtctttttcgtgacattcagttcgctgcgctcacggctctggcagtgaatgggggtaaatggcactacaggcgccttttatggattcatgcaaggaaactacccataatacaagaaaagcccgtcacgggcttctcagggcgttttatggcgggtctgctatgtggtgctatctgactttttgctgttcagcagttcctgccctctgattttccagtctgaccacttcggattatcccgtgacaggtcattcagactggctaatgcacccagtaaggcagcggtatcatcaacaggcttacccgtcttactgtcttttctacggggtctgacgctcagtggaacgaaaactcacgttaagggattttggtcatgagattatcaaaaaggatcttcacctagatccttttaaattaaaaatgaagttttaaatcaatctaaagtatatatgagtaaacttggtctgacagttaccaatgcttaatcagtgaggcacctatctcagcgatctgtctatttcgttcatccatagttgcctgactccccgtcgtgtagataactacgatacgggagggcttaccatctggccccagtgctgcaatgataccgcgagaaccacgctcaccggctccagatttatcagcaataaaccagccagccggaagggccgagcgcagaagtggtcctgcaactttatccgcctccatccagtctattaattgttgccgggaagctagagtaagtagttcgccagttaatagtttgcgcaacgttgttgccattgctacaggcatcgtggtgtcacgctcgtcgtttggtatggcttcattcagctccggttcccaacgatcaaggcgagttacatgatcccccatgttgtgcaaaaaagcggttagctccttcggtcctccgatcgttgtcagaagtaagttggccgcagtgttatcactcatggttatggcagcactgcataattctcttactgtcatgccatccgtaagatgcttttctgtgactggtgagtactcaaccaagtcattctgagaatagtgtatgcggcgaccgagttgctcttgcccggcgtcaatacgggataataccgcgccacatagcagaactttaaaagtgctcatcattggaaaacgttcttcggggcgaaaactctcaaggatcttaccgctgttgagatccagttcgatgtaacccactcgtgcacccaactgatcttcagcatcttttactttcaccagcgtttctgggtgagcaaaaacaggaaggcaaaatgccgcaaaaaagggaataagggcgacacggaaatgttgaatactcatactcttcctttttcaatattattgaagcatttatcagggttattgtctcatgagcggatacatatttgaatgtatttagaaaaataaacaaataggggttccgcgcacatttccccgaaaagtgccacctgacgtctaagaaaccattattatcatgacattaacctataaaaataggcgtatcacgaggccctttcgtctcgcgcgtttcggtgatgacggtgaaaacctctgacacatgcagctcccggagacggtcacagcttgtctgtaagcggatgccgggagcagacaagcccgtcagggcgcgtcagcgggtgttggcgggtgtcggggctggcttaactatgcggcatcagagcagattgtactgagagtgcaccatatgcggtgtgaaataccgcacagatgcgtaaggagaaaataccgcatcaggcgccattcgccattcaggctgcgcaactgttgggaagggcgatcggtgcgggcctcttcgctattacgccagctggcgaaagggggatgtgctgcaaggcgattaagttgggtaacgccagggttttcccagtcacgacgttgtaaaacgacggccagtgaattcgttaagacccactttcacatttaagttgtttttctaatccgcatatgatcaattcaaggccgaataagaaggctggctctgcaccttggtgatcaaataattcgatagcttgtcgtaataatggcggcatactatcagtagtaggtgtttccctttcttctttagcgacttgatgctcttgatcttccaatacgcaacctaaagtaaaatgccccacagcgctgagtgcatataatgcattctctagtgaaaaaccttgttggcataaaaaggctaattgattttcgagagtttcatactgtttttctgtaggccgtgtacctaaatgtacttttgctccatcgcgatgacttagtaaagcacatctaaaacttttagcgttattacgtaaaaaatcttgccagctttccccttctaaagggcaaaagtgagtatggtgcctatctaacatctcaatggctaaggcgtcgagcaaagcccgcttattttttacatgccaatacaatgtaggctgctctacacctagcttctgggcgagtttacgggttgttaaaccttcgattccgacctcattaagcagctctaatgcgctgttaatcactttacttttatctaatctagacatcattaattcctaatttttgttgacactctatcattgatagagttattttaccactccctatcagtgatagagaaaagtga

SEQ ID NO: 11 - DNA, 10157 bp, Artificial Sequence
  Description of Artificial Sequence: Synthetic polynucleotide
actacagtatataaggagggtaatatgatcttcgagacaatttctacgtcgaatcacgaagaagttgtgtattgccataacaaggacgccggcttgaaagcaatcatcgcgattcacaacactgtactcggtccggctctgggtggcactcgcatgtggccctacgctagcgaagaggaagcactgaaagatgtccttcgtttatcccgtgggatgacctacaaagctgcggtttcaggtctaaacctgggcggcggtaaagctgtgatctggggtgatccgaataaagacaagtctgaagcgctgtttagagccttcggacggtttgtaaacagcctgggcggacgctacattaccgcggaggacgttggcattgatgttaacgacatggaatatgtgctgcgtgaaactgattacgtcaccggtgtacatcaggttcacggtgggagtggtgatccttctccattcaccgcatatggcactctgcaaggcctgatggccgctctgcaagtgaaattcggtaacgaagacgtaggcaattacagctacgctgttcagggtgtgggtcacgttggcatggaatttgttaaactgctgcgtgagcgcggtgcaaaggttttcgtcactgacatcaacaaagatgcggtccagcgtgctgtggacgaatttggttgtgaggcagtagccctggatgaaatctatgacgttgattgcgacgtgtactccccgaccgctctgggcggcaccgtgaacgataaaactttaccgcgtctgaaatgtaaggtaatctgcggtgcggcaaacaaccagttagctaatgatgagataggcgtggaactggaaaagaaaggcatcctctatgctccggactacgcggtcaacgcgggtgggctgatgaacgttagcctggaaatcgatggatacaaccgcgaacgtgcgatgcgtatgatgcgtaccatttattacaatttgggtcgcattttcgaaatctctaagcgcgacggcatccctacattccgagccgccgatcgtatggctgaagaacgcataacggccatcggtaaactgcgtttaccgcatttgggcgctgcggcaccgcgcttccagggccgacgtggcaactaattacgacattttaaggaggttcgcatgtcgacgacaaccgttggtgactacttgctgtatcgcttaaacgaaatcggcattgagcacctcttcggagtgccaggtgattacaatctgcaatttctggatcatgtaatcgaccaccctcagctgacttgggtcggctgcactaacgaacttaacgctgcctacgcagctgatggttatgcgcgttgtcgtccggctgcggcactgctgaccaccttcggggttggcgaactgagcgctattaatggcatcgcaggttcctacgcggagtatctgccggtaatacatatcgttggtgcaccgagtctatcagcccagcagcagggcgacctgattcaccactctcttggcgaaggtgatttttccagcttcctgaggatgtcccaaccggtgtctgttgcgcaggctgctctgactcctgataacgcatgcaaggaaatcgaccgcgtactggcggaagtcctcattcagcgtcgtcccggctacctgctgctgtctaccgacgtggctgctgcgccggcggctctgccacaaagcactctttctttgccgaccgccccggatcatcgcgcagttctggctgctttcagcgacgctgctgagcagatgctggctcaggccaaaagcgtctctctactggcggactttctggctgatcgtttcggtgttactcgagcactggccgcgtggcttcagcaggttccgctaccgcacgccactctgttaatgggtaaaggcgttctgagtgaacagcaaccagggttcgtgggtacctacgctggtgcggcatctatcgattcgacgcgtggcgcaatcgaagaagctggggtaattatcggagtgggagttagattttccgacactatcacagcaggcttctcgcagcagatcgacgcccgccgttttatagacattcaacccttcttctctcgtattggcgatcgccagtttgatcacttgccgatgcaggctgccgtcgcagccctgcatcaactgtgtcttcgttatcagcagcagtggtctatcaccgctcctagcccgcctgcactgccgccggctgctggtagcgagctgtcccagaacgcattctggcaggcgatgcagaacttcatccgccctggggacctgttggtggccgaccaaggtactgcggcgttcggcgcagcggcgctgcgcttaccgcagaattgccagctgcttgtgcagccgctgtggggctcaatcggttacagtctgccggccacctttggtgctcagacggcagatacagagcgtcgtgtaatcctaatcattggcgatggttcagcgcaattaactattcaggaactttccagtatgatgcgtgacggcttgaaacctatcatctttctcctgaacaacaacggttacaccgttgaacgggcgattcacggcgcggagcaacgttataacgatatcgctgcttggaattggacccaactgccccaggcgctgagtgttcattgcccagcgcagagctggcgagtcgttgaaacggtgcagctgaccgacgtaatgaaagtcatcgctgcttctccgcgtctgagcttggtagaagttgttctgcctgcaatggatgtcccaccgctgctgcaagcagtgagtgccgctctgaaccagcgcaactcctcttaaatttttcaacggcctatcataaggaggaataatgacagcggagcagcaaaatggggtatccgactcacgccgtttcgaatttcaggaatttggtggccctatcgccccacagacctatcagctccccgcaccggctagcgatgaagttttgttaaaggtgaactactgcggtgtctgtcacagtgatgttcatcttcacgacggctacttcgagctgggtggcgataaacgtctgaacttcgctatgccgctgccgctgacgctgggtcacgaagtaattggcaccgttgtggctgtcggcgaccaggttactggtgtaaaaccgggggaccagcgactgatctatccgtggataggttgcggaaaatgcggcgcgtgtcaaaaaggagaagaaaacctgtgcgttactcctgcacatctgggcgtgaacaagccgggcggttacgctgatcacatcgttgtaccccattctcgctaccttctggacatttcgggtctgaacccgggtgatgccgctaccctcgcgtgctccggcctgaccactttcagcgcgatcaacaaagtgttgccgcttgcagatgaccagtggattgttgttatcggttgtggtggcctcggccagatggcgctgcgtatcctgcaagctatgggaattggcaatgttatcggtattgacctgtctgaagagaaacggaaactggctcatgaaagcggtgcacgtcactccttcgatccaaacactccgaagctgaaccgcgtggtcgccgaaacctgcccgggtacggtacaggccgcgttagactttgtgggcaatgagcaaactgctcagctggcactgtctctgcttggaaaaggtggcaaatatgttcctgtcgggctgcacggcggcgagctgcgttacccattgccgatcatcacgaacaaagctgtaagtatcatcggttcttacgttggtaccctgaaagaactggaagacttagttgctttcgccaaggaaaagaatctgccgccaattcatattgaacaccgcccgctggaatcggcggctcaggccgtagaggacctggaaaaaggacaggttgctgggcgtgttatcctggatgcaggtaactaagaaggagatatacatatgacccatcaattaagatcgcgcgatatcatcgctctgggctttatgacatttgcgttgttcgtcggcgcaggtaacattattttccctccaatggtcggcttgcaggcaggcgaacacgtctggactgcggcattcggcttcctcattactgccgttggcctaccggtattaacggtagtggcgctggcaaaagttggcggcggtgttgacagtctcagcacgccaattggtaaagtcgctggcgtactgctggcaacagtttgttacctggcggtggggccgctttttgctacgccgcgtacagctaccgtttcttttgaagtgggcattgcgccgctgacgggtgattccgcgctgccgctgtttatttacagcctggtctatttcgctatcgttattctggtttcgctctatccgggcaagctgctggataccgtgggcaacttccttgcgccgctgaaaattatcgcgctggtcatcctgtctgttgccgcaattatctggccggcgggttctatcagtacggcgactgaggcttatcaaaacgctgcgttttctaacggcttcgtcaacggctatctgaccatggatacgctgggcgcaatggtgtttggtatcgttattgttaacgcggcgcgttctcgtggcgttaccgaagcgcgtctgctgacccgttataccgtctgggctggcctgatggcgggtgttggtctgactctgctgtacctggcgctgttccgtctgggttcagacagcgcgtcgctggtcgatcagtctgcaaacggtgcggcgatcctgcatgcttacgttcagcatacctttggcggcggcggtagcttcctgctggcggcgttaatcttcatcgcctgcctggtcacggcggttggcctgacctgtgcttgtgcagaattcttcgcccagtacgtaccgctctcttatcgtacgctggtgtttatcctcggcggcttctcgatggtggtgtctaacctcggcttgagccagctgattcagatctctgtaccggtgctgaccgccatttatccgccgtgtatcgcactggttgtattaagttttacacgctcatggtggcataattcgtcccgcgtgattgctccgccgatgtttatcagcctgctttttggtattctcgacgggatcaaggcatctgcattcagcgatatcttaccgtcctgggcgcagcgtttaccgctggccgaacaaggtctggcgtggttaatgccaacagtggtgatggtggttctggccattatctgggatcgtgcggcaggtcgtcaggtgacctccagcgctcactaatacgcatggcatggatgaccgatggtagtgtgggctctccccatgcgagagtagggaactgccaggcatcaaataaaacgaaaggctcagtcgaaagactgggcctttcgttttatctgttgtttgtcggtgaacgctctcctgagtaggacaaatccgccgggagcggatttgaacgttgcgaagcaacggcccggagggtggcgggcaggacgcccgccataaactgccaggcatcaaattaagcagaaggccatcctgacggatggcctttttgcgtggccagtgccaagcttgcatgcgtgccagctgcattaatgaagaaatcatgctggaagaataacagctcactcaaaggcggtagtacgggttttgctgcccgcaaacgggctgttctggtgttgctagtttgttatcagaatcgcagatccggcttcagccggtttgccggctgaaagcgctatttcttccagaattgccatgattttttccccacgggaggcgtcactggctcccgtgttgtcggcagctttgattcgataagcagcatcgcctgtttcaggctgtctatgtgtgactgttgagctgtaacaagttgtctcaggtgttcaatttcatgttctagttgctttgttttactggtttcacctgttctattaggtgttacatgctgttcatctgttacattgtcgatctgttcatggtgaacagctttgaatgcaccaaaaactcgtaaaagctctgatgtatctatcttttttacaccgttttcatctgtgcatatggacagttttccctttgatatgtaacggtgaacagttgttctacttttgtttgttagtcttgatgcttcactgatagatacaagagccataagaacctcagatccttccgtatttagccagtatgttctctagtgtggttcgttgtttttgcgtgagccatgagaacgaaccattgagatcatacttactttgcatgtcactcaaaaattttgcctcaaaactggtgagctgaatttttgcagttaaagcatcgtgtagtgtttttcttagtccgttatgtaggtaggaatctgatgtaatggttgttggtattttgtcaccattcatttttatctggttgttctcaagttcggttacgagatccatttgtctatctagttcaacttggaaaatcaacgtatcagtcgggcggcctcgcttatcaaccaccaatttcatattgctgtaagtgtttaaatctttacttattggtttcaaaacccattggttaagccttttaaactcatggtagttattttcaagcattaacatgaacttaaattcatcaaggctaatctctatatttgccttgtgagttttcttttgtgttagttcttttaataaccactcataaatcctcatagagtatttgttttcaaaagacttaacatgttccagattatattttatgaatttttttaactggaaaagataaggcaatatctcttcactaaaaactaattctaatttttcgcttgagaacttggcatagtttgtccactggaaaatctcaaagcctttaaccaaaggattcctgatttccacagttctcgtcatcagctctctggttgctttagctaatacaccataagcattttccctactgatgttcatcatctgagcgtattggttataagtgaacgataccgtccgttctttccttgtagggttttcaatcgtggggttgagtagtgccacacagcataaaattagcttggtttcatgctccgttaagtcatagcgactaatcgctagttcatttgctttgaaaacaactaattcagacatacatctcaattggtctaggtgattttaatcactataccaattgagatgggctagtcaatgataattactagtccttttcctttgagttgtgggtatctgtaaattctgctagacctttgctggaaaacttgtaaattctgctagaccctctgtaaattccgctagacctttgtgtgttttttttgtttatattcaagtggttataatttatagaataaagaaagaataaaaaaagataaaaagaatagatcccagccctgtgtataactcactactttagtcagttccgcagtattacaaaaggatgtcgcaaacgctgtttgctcctctacaaaacagaccttaaaaccctaaaggcttaagtagcaccctcgcaagctcgggcaaatcgctgaatattccttttgtctccgaccatcaggcacctgagtcgctgtctttttcgtgacattcagttcgctgcgctcacggctctggcagtgaatgggggtaaatggcactacaggcgccttttatggattcatgcaaggaaactacccataatacaagaaaagcccgtcacgggcttctcagggcgttttatggcgggtctgctatgtggtgctatctgactttttgctgttcagcagttcctgccctctgattttccagtctgaccacttcggattatcccgtgacaggtcattcagactggctaatgcacccagtaaggcagcggtatcatcaacaggcttacccgtcttactgtcttttctacggggtctgacgctcagtggaacgaaaactcacgttaagggattttggtcatgagattatcaaaaaggatcttcacctagatccttttaaattaaaaatgaagttttaaatcaatctaaagtatatatgagtaaacttggtctgacagttaccaatgcttaatcagtgaggcacctatctcagcgatctgtctatttcgttcatccatagttgcctgactccccgtcgtgtagataactacgatacgggagggcttaccatctggccccagtgctgcaatgataccgcgagaaccacgctcaccggctccagatttatcagcaataaaccagccagccggaagggccgagcgcagaagtggtcctgcaactttatccgcctccatccagtctattaattgttgccgggaagctagagtaagtagttcgccagttaatagtttgcgcaacgttgttgccattgctacaggcatcgtggtgtcacgctcgtcgtttggtatggcttcattcagctccggttcccaacgatcaaggcgagttacatgatcccccatgttgtgcaaaaaagcggttagctccttcggtcctccgatcgttgtcagaagtaagttggccgcagtgttatcactcatggttatggcagcactgcataattctcttactgtcatgccatccgtaagatgcttttctgtgactggtgagtactcaaccaagtcattctgagaatagtgtatgcggcgaccgagttgctcttgcccggcgtcaatacgggataataccgcgccacatagcagaactttaaaagtgctcatcattggaaaacgttcttcggggcgaaaactctcaaggatcttaccgctgttgagatccagttcgatgtaacccactcgtgcacccaactgatcttcagcatcttttactttcaccagcgtttctgggtgagcaaaaacaggaaggcaaaatgccgcaaaaaagggaataagggcgacacggaaatgttgaatactcatactcttcctttttcaatattattgaagcatttatcagggttattgtctcatgagcggatacatatttgaatgtatttagaaaaataaacaaataggggttccgcgcacatttccccgaaaagtgccacctgacgtctaagaaaccattattatcatgacattaacctataaaaataggcgtatcacgaggccctttcgtctcgcgcgtttcggtgatgacggtgaaaacctctgacacatgcagctcccggagacggtcacagcttgtctgtaagcggatgccgggagcagacaagcccgtcagggcgcgtcagcgggtgttggcgggtgtcggggctggcttaactatgcggcatcagagcagattgtactgagagtgcaccatatgcggtgtgaaataccgcacagatgcgtaaggagaaaataccgcatcaggcgccattcgccattcaggctgcgcaactgttgggaagggcgatcggtgcgggcctcttcgctattacgccagctggcgaaagggggatgtgctgcaaggcgattaagttgggtaacgccagggttttcccagtcacgacgttgtaaaacgacggccagtgaattcgttaagacccactttcacatttaagttgtttttctaatccgcatatgatcaattcaaggccgaataagaaggctggctctgcaccttggtgatcaaataattcgatagcttgtcgtaataatggcggcatactatcagtagtaggtgtttccctttcttctttagcgacttgatgctcttgatcttccaatacgcaacctaaagtaaaatgccccacagcgctgagtgcatataatgcattctctagtgaaaaaccttgttggcataaaaaggctaattgattttcgagagtttcatactgtttttctgtaggccgtgtacctaaatgtacttttgctccatcgcgatgacttagtaaagcacatctaaaacttttagcgttattacgtaaaaaatcttgccagctttccccttctaaagggcaaaagtgagtatggtgcctatctaacatctcaatggctaaggcgtcgagcaaagcccgcttattttttacatgccaatacaatgtaggctgctctacacctagcttctgggcgagtttacgggttgttaaaccttcgattccgacctcattaagcagctctaatgcgctgttaatcactttacttttatctaatctagacatcattaattcctaatttttgttgacactctatcattgatagagttattttaccactccctatcagtgatagagaaaagtga

SEQ ID NO: 12 - DNA, 10156 bp, Artificial Sequence
  Description of Artificial Sequence: Synthetic polynucleotide
agtttacccgcgggattggaggtacacatgcagatcttcgacactttgcaatcaatgggccatgagcaggttgtcctatgtagcgataagaccacgggtctgcgcgccattatcgctatacacgatacatccttagggccggcgcttggtggtacccgtatgtggcagtatgcaactgacgacgatgctattactgacgcactccgtctgtctcggggcatgacctacaaagctgcggtttctggcgtaaatctgggcggtggtaaagccgttatcatcggaaaccctcacagtgataaaagcgaagcgctgtttcgcgcttacggcagaatggtggaatcccagcgtgggcgttacatcaccgccgaagacgttggtactagcgtacgtgatatggagtggattcgcatggaaaccaaatatgtaacgggcgtgggtggcaacggaggctctggtgacccctctccagttaccgctctgggtgtttactcgggcatgaaggcatgcgctaaatcagtctatggtactgatgcgctgagcggtaaaaggatcgtggttcagggcgcgggtaacgttgcatcccatctggttcacagtctggtaaaagaaggcgctgtggttttcgtcactgacatctacgaagaaaaggccaaagcattagcggctgaaacgggcgctaccgtgattcgcaccgacgaggtttttactacacaatgcgatatcttctctccgaacgctctgggggccgtcctgaacgatgaaactattccgcagctcacatgcgctatcgtagctggtggtgcaaacaatcagcttaaaatcgaacaacgtcacgccacggctctgcaagagaaaggcattctgtatgcgccggattacgtaatcaacgccgggggcctcatgaatgtggcgagcgaagttgacggctacaaccgtgaaaaggttatgcgccaggctgaaggtatttacgatattactatgaacatcctaaataccgcgcgtgagcgtaacatcctgaccatcgaagcatccaacgcgattgctgaagagcggatcaacaaagttcgccatgttcacgggaacttcatcggttccccgtctattcgcggagtataataaatcaaaacaccaaattaaggagaaattttatgtcgacgacaaccgttggtgactacttgctgtatcgcttaaacgaaatcggcattgagcacctcttcggagtgccaggtgattacaatctgcaatttctggatcatgtaatcgaccaccctcagctgacttgggtcggctgcactaacgaacttaacgctgcctacgcagctgatggttatgcgcgttgtcgtccggctgcggcactgctgaccaccttcggggttggcgaactgagcgctattaatggcatcgcaggttcctacgcggagtatctgccggtaatacatatcgttggtgcaccgagtctatcagcccagcagcagggcgacctgattcaccactctcttggcgaaggtgatttttccagcttcctgaggatgtcccaaccggtgtctgttgcgcaggctgctctgactcctgataacgcatgcaaggaaatcgaccgcgtactggcggaagtcctcattcagcgtcgtcccggctacctgctgctgtctaccgacgtggctgctgcgccggcggctctgccacaaagcactctttctttgccgaccgccccggatcatcgcgcagttctggctgctttcagcgacgctgctgagcagatgctggctcaggccaaaagcgtctctctactggcggactttctggctgatcgtttcggtgttactcgagcactggccgcgtggcttcagcaggttccgctaccgcacgccactctgttaatgggtaaaggcgttctgagtgaacagcaaccagggttcgtgggtacctacgctggtgcggcatctatcgattcgacgcgtggcgcaatcgaagaagctggggtaattatcggagtgggagttagattttccgacactatcacagcaggcttctcgcagcagatcgacgcccgccgttttatagacattcaacccttcttctctcgtattggcgatcgccagtttgatcacttgccgatgcaggctgccgtcgcagccctgcatcaactgtgtcttcgttatcagcagcagtggtctatcaccgctcctagcccgcctgcactgccgccggctgctggtagcgagctgtcccagaacgcattctggcaggcgatgcagaacttcatccgccctggggacctgttggtggccgaccaaggtactgcggcgttcggcgcagcggcgctgcgcttaccgcagaattgccagctgcttgtgcagccgctgtggggctcaatcggttacagtctgccggccacctttggtgctcagacggcagatacagagcgtcgtgtaatcctaatcattggcgatggttcagcgcaattaactattcaggaactttccagtatgatgcgtgacggcttgaaacctatcatctttctcctgaacaacaacggttacaccgttgaacgggcgattcacggcgcggagcaacgttataacgatatcgctgcttggaattggacccaactgccccaggcgctgagtgttcattgcccagcgcagagctggcgagtcgttgaaacggtgcagctgaccgacgtaatgaaagtcatcgctgcttctccgcgtctgagcttggtagaagttgttctgcctgcaatggatgtcccaccgctgctgcaagcagtgagtgccgctctgaaccagcgcaactcctcttaaatttttcaacggcctatcataaggaggaataatgacagcggagcagcaaaatggggtatccgactcacgccgtttcgaatttcaggaatttggtggccctatcgccccacagacctatcagctccccgcaccggctagcgatgaagttttgttaaaggtgaactactgcggtgtctgtcacagtgatgttcatcttcacgacggctacttcgagctgggtggcgataaacgtctgaacttcgctatgccgctgccgctgacgctgggtcacgaagtaattggcaccgttgtggctgtcggcgaccaggttactggtgtaaaaccgggggaccagcgactgatctatccgtggataggttgcggaaaatgcggcgcgtgtcaaaaaggagaagaaaacctgtgcgttactcctgcacatctgggcgtgaacaagccgggcggttacgctgatcacatcgttgtaccccattctcgctaccttctggacatttcgggtctgaacccgggtgatgccgctaccctcgcgtgctccggcctgaccactttcagcgcgatcaacaaagtgttgccgcttgcagatgaccagtggattgttgttatcggttgtggtggcctcggccagatggcgctgcgtatcctgcaagctatgggaattggcaatgttatcggtattgacctgtctgaagagaaacggaaactggctcatgaaagcggtgcacgtcactccttcgatccaaacactccgaagctgaaccgcgtggtcgccgaaacctgcccgggtacggtacaggccgcgttagactttgtgggcaatgagcaaactgctcagctggcactgtctctgcttggaaaaggtggcaaatatgttcctgtcgggctgcacggcggcgagctgcgttacccattgccgatcatcacgaacaaagctgtaagtatcatcggttcttacgttggtaccctgaaagaactggaagacttagttgctttcgccaaggaaaagaatctgccgccaattcatattgaacaccgcccgctggaatcggcggctcaggccgtagaggacctggaaaaaggacaggttgctgggcgtgttatcctggatgcaggtaactaagaaggagatatacatatgacccatcaattaagatcgcgcgatatcatcgctctgggctttatgacatttgcgttgttcgtcggcgcaggtaacattattttccctccaatggtcggcttgcaggcaggcgaacacgtctggactgcggcattcggcttcctcattactgccgttggcctaccggtattaacggtagtggcgctggcaaaagttggcggcggtgttgacagtctcagcacgccaattggtaaagtcgctggcgtactgctggcaacagtttgttacctggcggtggggccgctttttgctacgccgcgtacagctaccgtttcttttgaagtgggcattgcgccgctgacgggtgattccgcgctgccgctgtttatttacagcctggtctatttcgctatcgttattctggtttcgctctatccgggcaagctgctggataccgtgggcaacttccttgcgccgctgaaaattatcgcgctggtcatcctgtctgttgccgcaattatctggccggcgggttctatcagtacggcgactgaggcttatcaaaacgctgcgttttctaacggcttcgtcaacggctatctgaccatggatacgctgggcgcaatggtgtttggtatcgttattgttaacgcggcgcgttctcgtggcgttaccgaagcgcgtctgctgacccgttataccgtctgggctggcctgatggcgggtgttggtctgactctgctgtacctggcgctgttccgtctgggttcagacagcgcgtcgctggtcgatcagtctgcaaacggtgcggcgatcctgcatgcttacgttcagcatacctttggcggcggcggtagcttcctgctggcggcgttaatcttcatcgcctgcctggtcacggcggttggcctgacctgtgcttgtgcagaattcttcgcccagtacgtaccgctctcttatcgtacgctggtgtttatcctcggcggcttctcgatggtggtgtctaacctcggcttgagccagctgattcagatctctgtaccggtgctgaccgccatttatccgccgtgtatcgcactggttgtattaagttttacacgctcatggtggcataattcgtcccgcgtgattgctccgccgatgtttatcagcctgctttttggtattctcgacgggatcaaggcatctgcattcagcgatatcttaccgtcctgggcgcagcgtttaccgctggccgaacaaggtctggcgtggttaatgccaacagtggtgatggtggttctggccattatctgggatcgtgcggcaggtcgtcaggtgacctccagcgctcactaatacgcatggcatggatgaccgatggtagtgtgggctctccccatgcgagagtagggaactgccaggcatcaaataaaacgaaaggctcagtcgaaagactgggcctttcgttttatctgttgtttgtcggtgaacgctctcctgagtaggacaaatccgccgggagcggatttgaacgttgcgaagcaacggcccggagggtggcgggcaggacgcccgccataaactgccaggcatcaaattaagcagaaggccatcctgacggatggcctttttgcgtggccagtgccaagcttgcatgcgtgccagctgcattaatgaagaaatcatgctggaagaataacagctcactcaaaggcggtagtacgggttttgctgcccgcaaacgggctgttctggtgttgctagtttgttatcagaatcgcagatccggcttcagccggtttgccggctgaaagcgctatttcttccagaattgccatgattttttccccacgggaggcgtcactggctcccgtgttgtcggcagctttgattcgataagcagcatcgcctgtttcaggctgtctatgtgtgactgttgagctgtaacaagttgtctcaggtgttcaatttcatgttctagttgctttgttttactggtttcacctgttctattaggtgttacatgctgttcatctgttacattgtcgatctgttcatggtgaacagctttgaatgcaccaaaaactcgtaaaagctctgatgtatctatcttttttacaccgttttcatctgtgcatatggacagttttccctttgatatgtaacggtgaacagttgttctacttttgtttgttagtcttgatgcttcactgatagatacaagagccataagaacctcagatccttccgtatttagccagtatgttctctagtgtggttcgttgtttttgcgtgagccatgagaacgaaccattgagatcatacttactttgcatgtcactcaaaaattttgcctcaaaactggtgagctgaatttttgcagttaaagcatcgtgtagtgtttttcttagtccgttatgtaggtaggaatctgatgtaatggttgttggtattttgtcaccattcatttttatctggttgttctcaagttcggttacgagatccatttgtctatctagttcaacttggaaaatcaacgtatcagtcgggcggcctcgcttatcaaccaccaatttcatattgctgtaagtgtttaaatctttacttattggtttcaaaacccattggttaagccttttaaactcatggtagttattttcaagcattaacatgaacttaaattcatcaaggctaatctctatatttgccttgtgagttttcttttgtgttagttcttttaataaccactcataaatcctcatagagtatttgttttcaaaagacttaacatgttccagattatattttatgaatttttttaactggaaaagataaggcaatatctcttcactaaaaactaattctaatttttcgcttgagaacttggcatagtttgtccactggaaaatctcaaagcctttaaccaaaggattcctgatttccacagttctcgtcatcagctctctggttgctttagctaatacaccataagcattttccctactgatgttcatcatctgagcgtattggttataagtgaacgataccgtccgttctttccttgtagggttttcaatcgtggggttgagtagtgccacacagcataaaattagcttggtttcatgctccgttaagtcatagcgactaatcgctagttcatttgctttgaaaacaactaattcagacatacatctcaattggtctaggtgattttaatcactataccaattgagatgggctagtcaatgataattactagtccttttcctttgagttgtgggtatctgtaaattctgctagacctttgctggaaaacttgtaaattctgctagaccctctgtaaattccgctagacctttgtgtgttttttttgtttatattcaagtggttataatttatagaataaagaaagaataaaaaaagataaaaagaatagatcccagccctgtgtataactcactactttagtcagttccgcagtattacaaaaggatgtcgcaaacgctgtttgctcctctacaaaacagaccttaaaaccctaaaggcttaagtagcaccctcgcaagctcgggcaaatcgctgaatattccttttgtctccgaccatcaggcacctgagtcgctgtctttttcgtgacattcagttcgctgcgctcacggctctggcagtgaatgggggtaaatggcactacaggcgccttttatggattcatgcaaggaaactacccataatacaagaaaagcccgtcacgggcttctcagggcgttttatggcgggtctgctatgtggtgctatctgactttttgctgttcagcagttcctgccctctgattttccagtctgaccacttcggattatcccgtgacaggtcattcagactggctaatgcacccagtaaggcagcggtatcatcaacaggcttacccgtcttactgtcttttctacggggtctgacgctcagtggaacgaaaactcacgttaagggattttggtcatgagattatcaaaaaggatcttcacctagatccttttaaattaaaaatgaagttttaaatcaatctaaagtatatatgagtaaacttggtctgacagttaccaatgcttaatcagtgaggcacctatctcagcgatctgtctatttcgttcatccatagttgcctgactccccgtcgtgtagataactacgatacgggagggcttaccatctggccccagtgctgcaatgataccgcgagaaccacgctcaccggctccagatttatcagcaataaaccagccagccggaagggccgagcgcagaagtggtcctgcaactttatccgcctccatccagtctattaattgttgccgggaagctagagtaagtagttcgccagttaatagtttgcgcaacgttgttgccattgctacaggcatcgtggtgtcacgctcgtcgtttggtatggcttcattcagctccggttcccaacgatcaaggcgagttacatgatcccccatgttgtgcaaaaaagcggttagctccttcggtcctccgatcgttgtcagaagtaagttggccgcagtgttatcactcatggttatggcagcactgcataattctcttactgtcatgccatccgtaagatgcttttctgtgactggtgagtactcaaccaagtcattctgagaatagtgtatgcggcgaccgagttgctcttgcccggcgtcaatacgggataataccgcgccacatagcagaactttaaaagtgctcatcattggaaaacgttcttcggggcgaaaactctcaaggatcttaccgctgttgagatccagttcgatgtaacccactcgtgcacccaactgatcttcagcatcttttactttcaccagcgtttctgggtgagcaaaaacaggaaggcaaaatgccgcaaaaaagggaataagggcgacacggaaatgttgaatactcatactcttcctttttcaatattattgaagcatttatcagggttattgtctcatgagcggatacatatttgaatgtatttagaaaaataaacaaataggggttccgcgcacatttccccgaaaagtgccacctgacgtctaagaaaccattattatcatgacattaacctataaaaataggcgtatcacgaggccctttcgtctcgcgcgtttcggtgatgacggtgaaaacctctgacacatgcagctcccggagacggtcacagcttgtctgtaagcggatgccgggagcagacaagcccgtcagggcgcgtcagcgggtgttggcgggtgtcggggctggcttaactatgcggcatcagagcagattgtactgagagtgcaccatatgcggtgtgaaataccgcacagatgcgtaaggagaaaataccgcatcaggcgccattcgccattcaggctgcgcaactgttgggaagggcgatcggtgcgggcctcttcgctattacgccagctggcgaaagggggatgtgctgcaaggcgattaagttgggtaacgccagggttttcccagtcacgacgttgtaaaacgacggccagtgaattcgttaagacccactttcacatttaagttgtttttctaatccgcatatgatcaattcaaggccgaataagaaggctggctctgcaccttggtgatcaaataattcgatagcttgtcgtaataatggcggcatactatcagtagtaggtgtttccctttcttctttagcgacttgatgctcttgatcttccaatacgcaacctaaagtaaaatgccccacagcgctgagtgcatataatgcattctctagtgaaaaaccttgttggcataaaaaggctaattgattttcgagagtttcatactgtttttctgtaggccgtgtacctaaatgtacttttgctccatcgcgatgacttagtaaagcacatctaaaacttttagcgttattacgtaaaaaatcttgccagctttccccttctaaagggcaaaagtgagtatggtgcctatctaacatctcaatggctaaggcgtcgagcaaagcccgcttattttttacatgccaatacaatgtaggctgctctacacctagcttctgggcgagtttacgggttgttaaaccttcgattccgacctcattaagcagctctaatgcgctgttaatcactttacttttatctaatctagacatcattaattcctaatttttgttgacactctatcattgatagagttattttaccactccctatcagtgatagagaaaagtga

SEQ ID NO: 13 - DNA, 10122 bp, Artificial Sequence
  Description of Artificial Sequence: Synthetic polynucleotide
aatattcacgtaaggaggtaatagatgcagatcttcgacactttgcaatcaatgggccatgagcaggttgtcctatgtagcgataagaccacgggtctgcgcgccattatcgctatacacgatacatccttagggccggcgcttggtggtacccgtatgtggcagtatgcaactgacgacgatgctattactgacgcactccgtctgtctcggggcatgacctacaaagctgcggtttctggcgtaaatctgggcggtggtaaagccgttatcatcggaaaccctcacagtgataaaagcgaagcgctgtttcgcgcttacggcagaatggtggaatcccagcgtgggcgttacatcaccgccgaagacgttggtactagcgtacgtgatatggagtggattcgcatggaaaccaaatatgtaacgggcgtgggtggcaacggaggctctggtgacccctctccagttaccgctctgggtgtttactcgggcatgaaggcatgcgctaaatcagtctatggtactgatgcgctgagcggtaaaaggatcgtggttcagggcgcgggtaacgttgcatcccatctggttcacagtctggtaaaagaaggcgctgtggttttcgtcactgacatctacgaagaaaaggccaaagcattagcggctgaaacgggcgctaccgtgattcgcaccgacgaggtttttactacacaatgcgatatcttctctccgaacgctctgggggccgtcctgaacgatgaaactattccgcagctcacatgcgctatcgtagctggtggtgcaaacaatcagcttaaaatcgaacaacgtcacgccacggctctgcaagagaaaggcattctgtatgcgccggattacgtaatcaacgccgggggcctcatgaatgtggcgagcgaagttgacggctacaaccgtgaaaaggttatgcgccaggctgaaggtatttacgatattactatgaacatcctaaataccgcgcgtgagcgtaacatcctgaccatcgaagcatccaacgcgattgctgaagagcggatcaacaaagttcgccatgttcacgggaacttcatcggttccccgtctattcgcggagtataataaatcaaaacaccaaattaaggagaaattttatgtcgacgacaaccgttggtgactacttgctgtatcgcttaaacgaaatcggcattgagcacctcttcggagtgccaggtgattacaatctgcaatttctggatcatgtaatcgaccaccctcagctgacttgggtcggctgcactaacgaacttaacgctgcctacgcagctgatggttatgcgcgttgtcgtccggctgcggcactgctgaccaccttcggggttggcgaactgagcgctattaatggcatcgcaggttcctacgcggagtatctgccggtaatacatatcgttggtgcaccgagtctatcagcccagcagcagggcgacctgattcaccactctcttggcgaaggtgatttttccagcttcctgaggatgtcccaaccggtgtctgttgcgcaggctgctctgactcctgataacgcatgcaaggaaatcgaccgcgtactggcggaagtcctcattcagcgtcgtcccggctacctgctgctgtctaccgacgtggctgctgcgccggcggctctgccacaaagcactctttctttgccgaccgccccggatcatcgcgcagttctggctgctttcagcgacgctgctgagcagatgctggctcaggccaaaagcgtctctctactggcggactttctggctgatcgtttcggtgttactcgagcactggccgcgtggcttcagcaggttccgctaccgcacgccactctgttaatgggtaaaggcgttctgagtgaacagcaaccagggttcgtgggtacctacgctggtgcggcatctatcgattcgacgcgtggcgcaatcgaagaagctggggtaattatcggagtgggagttagattttccgacactatcacagcaggcttctcgcagcagatcgacgcccgccgttttatagacattcaacccttcttctctcgtattggcgatcgccagtttgatcacttgccgatgcaggctgccgtcgcagccctgcatcaactgtgtcttcgttatcagcagcagtggtctatcaccgctcctagcccgcctgcactgccgccggctgctggtagcgagctgtcccagaacgcattctggcaggcgatgcagaacttcatccgccctggggacctgttggtggccgaccaaggtactgcggcgttcggcgcagcggcgctgcgcttaccgcagaattgccagctgcttgtgcagccgctgtggggctcaatcggttacagtctgccggccacctttggtgctcagacggcagatacagagcgtcgtgtaatcctaatcattggcgatggttcagcgcaattaactattcaggaactttccagtatgatgcgtgacggcttgaaacctatcatctttctcctgaacaacaacggttacaccgttgaacgggcgattcacggcgcggagcaacgttataacgatatcgctgcttggaattggacccaactgccccaggcgctgagtgttcattgcccagcgcagagctggcgagtcgttgaaacggtgcagctgaccgacgtaatgaaagtcatcgctgcttctccgcgtctgagcttggtagaagttgttctgcctgcaatggatgtcccaccgctgctgcaagcagtgagtgccgctctgaaccagcgcaactcctcttaatccctccctacgggttaaggagcccctgctatgcgcagcatgcagtttgatgagtacggtgcacccctgaaagcgttctcatatgaagacccgaccccgcaagggaaggaagtagtcgttaggatcgaagcctgtggtgtgtgccactctgatattcatcttcacgagggctacttcgacatgggcggtggcaataaagctgatgttactcgtgctcgcgaactcccttttacattgggtcatgaaatcgttggcgaagtggtagcaactggaccaggtgtcaccggcgctaaaccgggcgacaaacgtattgtgtacccgtggatcgggtgcggcgactgcccgaaatgcaacagtggtgaggatcagtcctgtgcgcgtccacgtaacctgggtgttcacgttgacggtggctattcgacgcacgtaaagataccggacgaaaaattcctgttcgcctacgatggtattcctactgagttagcgggaacctatgcttgcagcggcatcaccgcttatggtgcactgatgaaagcaaaggaagcggctgaaagatctggctacatcggtctgattggcgctggtggcgttggcatggctggtctgatgctggccaaagcagcgatcggggctaaaactgtagtctttgatatcgacgacgcaaaactggaagctgcgacccgtgccggggcggattacgtgttcaactccggtgcaaaagaaacacgcaaggaagttatgaaactaacgaatggtggcctgtctggtgctgttgatttcgttggcagcgataaaagcgctctgtttggaatcaacgccttgggtcagaacggcgtgctggtcataattggactgttcggtggcgctatgactgttccggtacccctgttcccgctgaaagggatcaccgtacgtggctcatacgtaggttccctgcaagagatgagtgatatgatggagttagttcgcgctgggaaagttcctccgatgccggtaaaaactcggccactggacgctgcctgggaaacccttgaggatctacgccatggtaaaatcgtgggccgtgttgttctgaccccataagaaggagatatacatatgacccatcaattaagatcgcgcgatatcatcgctctgggctttatgacatttgcgttgttcgtcggcgcaggtaacattattttccctccaatggtcggcttgcaggcaggcgaacacgtctggactgcggcattcggcttcctcattactgccgttggcctaccggtattaacggtagtggcgctggcaaaagttggcggcggtgttgacagtctcagcacgccaattggtaaagtcgctggcgtactgctggcaacagtttgttacctggcggtggggccgctttttgctacgccgcgtacagctaccgtttcttttgaagtgggcattgcgccgctgacgggtgattccgcgctgccgctgtttatttacagcctggtctatttcgctatcgttattctggtttcgctctatccgggcaagctgctggataccgtgggcaacttccttgcgccgctgaaaattatcgcgctggtcatcctgtctgttgccgcaattatctggccggcgggttctatcagtacggcgactgaggcttatcaaaacgctgcgttttctaacggcttcgtcaacggctatctgaccatggatacgctgggcgcaatggtgtttggtatcgttattgttaacgcggcgcgttctcgtggcgttaccgaagcgcgtctgctgacccgttataccgtctgggctggcctgatggcgggtgttggtctgactctgctgtacctggcgctgttccgtctgggttcagacagcgcgtcgctggtcgatcagtctgcaaacggtgcggcgatcctgcatgcttacgttcagcatacctttggcggcggcggtagcttcctgctggcggcgttaatcttcatcgcctgcctggtcacggcggttggcctgacctgtgcttgtgcagaattcttcgcccagtacgtaccgctctcttatcgtacgctggtgtttatcctcggcggcttctcgatggtggtgtctaacctcggcttgagccagctgattcagatctctgtaccggtgctgaccgccatttatccgccgtgtatcgcactggttgtattaagttttacacgctcatggtggcataattcgtcccgcgtgattgctccgccgatgtttatcagcctgctttttggtattctcgacgggatcaaggcatctgcattcagcgatatcttaccgtcctgggcgcagcgtttaccgctggccgaacaaggtctggcgtggttaatgccaacagtggtgatggtggttctggccattatctgggatcgtgcggcaggtcgtcaggtgacctccagcgctcactaatacgcatggcatggatgaccgatggtagtgtgggctctccccatgcgagagtagggaactgccaggcatcaaataaaacgaaaggctcagtcgaaagactgggcctttcgttttatctgttgtttgtcggtgaacgctctcctgagtaggacaaatccgccgggagcggatttgaacgttgcgaagcaacggcccggagggtggcgggcaggacgcccgccataaactgccaggcatcaaattaagcagaaggccatcctgacggatggcctttttgcgtggccagtgccaagcttgcatgcgtgccagctgcattaatgaagaaatcatgctggaagaataacagctcactcaaaggcggtagtacgggttttgctgcccgcaaacgggctgttctggtgttgctagtttgttatcagaatcgcagatccggcttcagccggtttgccggctgaaagcgctatttcttccagaattgccatgattttttccccacgggaggcgtcactggctcccgtgttgtcggcagctttgattcgataagcagcatcgcctgtttcaggctgtctatgtgtgactgttgagctgtaacaagttgtctcaggtgttcaatttcatgttctagttgctttgttttactggtttcacctgttctattaggtgttacatgctgttcatctgttacattgtcgatctgttcatggtgaacagctttgaatgcaccaaaaactcgtaaaagctctgatgtatctatcttttttacaccgttttcatctgtgcatatggacagttttccctttgatatgtaacggtgaacagttgttctacttttgtttgttagtcttgatgcttcactgatagatacaagagccataagaacctcagatccttccgtatttagccagtatgttctctagtgtggttcgttgtttttgcgtgagccatgagaacgaaccattgagatcatacttactttgcatgtcactcaaaaattttgcctcaaaactggtgagctgaatttttgcagttaaagcatcgtgtagtgtttttcttagtccgttatgtaggtaggaatctgatgtaatggttgttggtattttgtcaccattcatttttatctggttgttctcaagttcggttacgagatccatttgtctatctagttcaacttggaaaatcaacgtatcagtcgggcggcctcgcttatcaaccaccaatttcatattgctgtaagtgtttaaatctttacttattggtttcaaaacccattggttaagccttttaaactcatggtagttattttcaagcattaacatgaacttaaattcatcaaggctaatctctatatttgccttgtgagttttcttttgtgttagttcttttaataaccactcataaatcctcatagagtatttgttttcaaaagacttaacatgttccagattatattttatgaatttttttaactggaaaagataaggcaatatctcttcactaaaaactaattctaatttttcgcttgagaacttggcatagtttgtccactggaaaatctcaaagcctttaaccaaaggattcctgatttccacagttctcgtcatcagctctctggttgctttagctaatacaccataagcattttccctactgatgttcatcatctgagcgtattggttataagtgaacgataccgtccgttctttccttgtagggttttcaatcgtggggttgagtagtgccacacagcataaaattagcttggtttcatgctccgttaagtcatagcgactaatcgctagttcatttgctttgaaaacaactaattcagacatacatctcaattggtctaggtgattttaatcactataccaattgagatgggctagtcaatgataattactagtccttttcctttgagttgtgggtatctgtaaattctgctagacctttgctggaaaacttgtaaattctgctagaccctctgtaaattccgctagacctttgtgtgttttttttgtttatattcaagtggttataatttatagaataaagaaagaataaaaaaagataaaaagaatagatcccagccctgtgtataactcactactttagtcagttccgcagtattacaaaaggatgtcgcaaacgctgtttgctcctctacaaaacagaccttaaaaccctaaaggcttaagtagcaccctcgcaagctcgggcaaatcgctgaatattccttttgtctccgaccatcaggcacctgagtcgctgtctttttcgtgacattcagttcgctgcgctcacggctctggcagtgaatgggggtaaatggcactacaggcgccttttatggattcatgcaaggaaactacccataatacaagaaaagcccgtcacgggcttctcagggcgttttatggcgggtctgctatgtggtgctatctgactttttgctgttcagcagttcctgccctctgattttccagtctgaccacttcggattatcccgtgacaggtcattcagactggctaatgcacccagtaaggcagcggtatcatcaacaggcttacccgtcttactgtcttttctacggggtctgacgctcagtggaacgaaaactcacgttaagggattttggtcatgagattatcaaaaaggatcttcacctagatccttttaaattaaaaatgaagttttaaatcaatctaaagtatatatgagtaaacttggtctgacagttaccaatgcttaatcagtgaggcacctatctcagcgatctgtctatttcgttcatccatagttgcctgactccccgtcgtgtagataactacgatacgggagggcttaccatctggccccagtgctgcaatgataccgcgagaaccacgctcaccggctccagatttatcagcaataaaccagccagccggaagggccgagcgcagaagtggtcctgcaactttatccgcctccatccagtctattaattgttgccgggaagctagagtaagtagttcgccagttaatagtttgcgcaacgttgttgccattgctacaggcatcgtggtgtcacgctcgtcgtttggtatggcttcattcagctccggttcccaacgatcaaggcgagttacatgatcccccatgttgtgcaaaaaagcggttagctccttcggtcctccgatcgttgtcagaagtaagttggccgcagtgttatcactcatggttatggcagcactgcataattctcttactgtcatgccatccgtaagatgcttttctgtgactggtgagtactcaaccaagtcattctgagaatagtgtatgcggcgaccgagttgctcttgcccggcgtcaatacgggataataccgcgccacatagcagaactttaaaagtgctcatcattggaaaacgttcttcggggcgaaaactctcaaggatcttaccgctgttgagatccagttcgatgtaacccactcgtgcacccaactgatcttcagcatcttttactttcaccagcgtttctgggtgagcaaaaacaggaaggcaaaatgccgcaaaaaagggaataagggcgacacggaaatgttgaatactcatactcttcctttttcaatattattgaagcatttatcagggttattgtctcatgagcggatacatatttgaatgtatttagaaaaataaacaaataggggttccgcgcacatttccccgaaaagtgccacctgacgtctaagaaaccattattatcatgacattaacctataaaaataggcgtatcacgaggccctttcgtctcgcgcgtttcggtgatgacggtgaaaacctctgacacatgcagctcccggagacggtcacagcttgtctgtaagcggatgccgggagcagacaagcccgtcagggcgcgtcagcgggtgttggcgggtgtcggggctggcttaactatgcggcatcagagcagattgtactgagagtgcaccatatgcggtgtgaaataccgcacagatgcgtaaggagaaaataccgcatcaggcgccattcgccattcaggctgcgcaactgttgggaagggcgatcggtgcgggcctcttcgctattacgccagctggcgaaagggggatgtgctgcaaggcgattaagttgggtaacgccagggttttcccagtcacgacgttgtaaaacgacggccagtgaattcgttaagacccactttcacatttaagttgtttttctaatccgcatatgatcaattcaaggccgaataagaaggctggctctgcaccttggtgatcaaataattcgatagcttgtcgtaataatggcggcatactatcagtagtaggtgtttccctttcttctttagcgacttgatgctcttgatcttccaatacgcaacctaaagtaaaatgccccacagcgctgagtgcatataatgcattctctagtgaaaaaccttgttggcataaaaaggctaattgattttcgagagtttcatactgtttttctgtaggccgtgtacctaaatgtacttttgctccatcgcgatgacttagtaaagcacatctaaaacttttagcgttattacgtaaaaaatcttgccagctttccccttctaaagggcaaaagtgagtatggtgcctatctaacatctcaatggctaaggcgtcgagcaaagcccgcttattttttacatgccaatacaatgtaggctgctctacacctagcttctgggcgagtttacgggttgttaaaccttcgattccgacctcattaagcagctctaatgcgctgttaatcactttacttttatctaatctagacatcattaattcctaatttttgttgacactctatcattgatagagttattttaccactccctatcagtgatagagaaaagtga

SEQ ID NO: 14 - DNA, 10153 bp, Artificial Sequence
  Description of Artificial Sequence: Synthetic polynucleotide
aatattcacgtaaggaggtaatagatgcagatcttcgacactttgcaatcaatgggccatgagcaggttgtcctatgtagcgataagaccacgggtctgcgcgccattatcgctatacacgatacatccttagggccggcgcttggtggtacccgtatgtggcagtatgcaactgacgacgatgctattactgacgcactccgtctgtctcggggcatgacctacaaagctgcggtttctggcgtaaatctgggcggtggtaaagccgttatcatcggaaaccctcacagtgataaaagcgaagcgctgtttcgcgcttacggcagaatggtggaatcccagcgtgggcgttacatcaccgccgaagacgttggtactagcgtacgtgatatggagtggattcgcatggaaaccaaatatgtaacgggcgtgggtggcaacggaggctctggtgacccctctccagttaccgctctgggtgtttactcgggcatgaaggcatgcgctaaatcagtctatggtactgatgcgctgagcggtaaaaggatcgtggttcagggcgcgggtaacgttgcatcccatctggttcacagtctggtaaaagaaggcgctgtggttttcgtcactgacatctacgaagaaaaggccaaagcattagcggctgaaacgggcgctaccgtgattcgcaccgacgaggtttttactacacaatgcgatatcttctctccgaacgctctgggggccgtcctgaacgatgaaactattccgcagctcacatgcgctatcgtagctggtggtgcaaacaatcagcttaaaatcgaacaacgtcacgccacggctctgcaagagaaaggcattctgtatgcgccggattacgtaatcaacgccgggggcctcatgaatgtggcgagcgaagttgacggctacaaccgtgaaaaggttatgcgccaggctgaaggtatttacgatattactatgaacatcctaaataccgcgcgtgagcgtaacatcctgaccatcgaagcatccaacgcgattgctgaagagcggatcaacaaagttcgccatgttcacgggaacttcatcggttccccgtctattcgcggagtataataaatcaaaacaccaaattaaggagaaattttatgtcgacgacaaccgttggtgactacttgctgtatcgcttaaacgaaatcggcattgagcacctcttcggagtgccaggtgattacaatctgcaatttctggatcatgtaatcgaccaccctcagctgacttgggtcggctgcactaacgaacttaacgctgcctacgcagctgatggttatgcgcgttgtcgtccggctgcggcactgctgaccaccttcggggttggcgaactgagcgctattaatggcatcgcaggttcctacgcggagtatctgccggtaatacatatcgttggtgcaccgagtctatcagcccagcagcagggcgacctgattcaccactctcttggcgaaggtgatttttccagcttcctgaggatgtcccaaccggtgtctgttgcgcaggctgctctgactcctgataacgcatgcaaggaaatcgaccgcgtactggcggaagtcctcattcagcgtcgtcccggctacctgctgctgtctaccgacgtggctgctgcgccggcggctctgccacaaagcactctttctttgccgaccgccccggatcatcgcgcagttctggctgctttcagcgacgctgctgagcagatgctggctcaggccaaaagcgtctctctactggcggactttctggctgatcgtttcggtgttactcgagcactggccgcgtggcttcagcaggttccgctaccgcacgccactctgttaatgggtaaaggcgttctgagtgaacagcaaccagggttcgtgggtacctacgctggtgcggcatctatcgattcgacgcgtggcgcaatcgaagaagctggggtaattatcggagtgggagttagattttccgacactatcacagcaggcttctcgcagcagatcgacgcccgccgttttatagacattcaacccttcttctctcgtattggcgatcgccagtttgatcacttgccgatgcaggctgccgtcgcagccctgcatcaactgtgtcttcgttatcagcagcagtggtctatcaccgctcctagcccgcctgcactgccgccggctgctggtagcgagctgtcccagaacgcattctggcaggcgatgcagaacttcatccgccctggggacctgttggtggccgaccaaggtactgcggcgttcggcgcagcggcgctgcgcttaccgcagaattgccagctgcttgtgcagccgctgtggggctcaatcggttacagtctgccggccacctttggtgctcagacggcagatacagagcgtcgtgtaatcctaatcattggcgatggttcagcgcaattaactattcaggaactttccagtatgatgcgtgacggcttgaaacctatcatctttctcctgaacaacaacggttacaccgttgaacgggcgattcacggcgcggagcaacgttataacgatatcgctgcttggaattggacccaactgccccaggcgctgagtgttcattgcccagcgcagagctggcgagtcgttgaaacggtgcagctgaccgacgtaatgaaagtcatcgctgcttctccgcgtctgagcttggtagaagttgttctgcctgcaatggatgtcccaccgctgctgcaagcagtgagtgccgctctgaaccagcgcaactcctcttaaatttttcaacggcctatcataaggaggaataatgacagcggagcagcaaaatggggtatccgactcacgccgtttcgaatttcaggaatttggtggccctatcgccccacagacctatcagctccccgcaccggctagcgatgaagttttgttaaaggtgaactactgcggtgtctgtcacagtgatgttcatcttcacgacggctacttcgagctgggtggcgataaacgtctgaacttcgctatgccgctgccgctgacgctgggtcacgaagtaattggcaccgttgtggctgtcggcgaccaggttactggtgtaaaaccgggggaccagcgactgatctatccgtggataggttgcggaaaatgcggcgcgtgtcaaaaaggagaagaaaacctgtgcgttactcctgcacatctgggcgtgaacaagccgggcggttacgctgatcacatcgttgtaccccattctcgctaccttctggacatttcgggtctgaacccgggtgatgccgctaccctcgcgtgctccggcctgaccactttcagcgcgatcaacaaagtgttgccgcttgcagatgaccagtggattgttgttatcggttgtggtggcctcggccagatggcgctgcgtatcctgcaagctatgggaattggcaatgttatcggtattgacctgtctgaagagaaacggaaactggctcatgaaagcggtgcacgtcactccttcgatccaaacactccgaagctgaaccgcgtggtcgccgaaacctgcccgggtacggtacaggccgcgttagactttgtgggcaatgagcaaactgctcagctggcactgtctctgcttggaaaaggtggcaaatatgttcctgtcgggctgcacggcggcgagctgcgttacccattgccgatcatcacgaacaaagctgtaagtatcatcggttcttacgttggtaccctgaaagaactggaagacttagttgctttcgccaaggaaaagaatctgccgccaattcatattgaacaccgcccgctggaatcggcggctcaggccgtagaggacctggaaaaaggacaggttgctgggcgtgttatcctggatgcaggtaactaagaaggagatatacatatgacccatcaattaagatcgcgcgatatcatcgctctgggctttatgacatttgcgttgttcgtcggcgcaggtaacattattttccctccaatggtcggcttgcaggcaggcgaacacgtctggactgcggcattcggcttcctcattactgccgttggcctaccggtattaacggtagtggcgctggcaaaagttggcggcggtgttgacagtctcagcacgccaattggtaaagtcgctggcgtactgctggcaacagtttgttacctggcggtggggccgctttttgctacgccgcgtacagctaccgtttcttttgaagtgggcattgcgccgctgacgggtgattccgcgctgccgctgtttatttacagcctggtctatttcgctatcgttattctggtttcgctctatccgggcaagctgctggataccgtgggcaacttccttgcgccgctgaaaattatcgcgctggtcatcctgtctgttgccgcaattatctggccggcgggttctatcagtacggcgactgaggcttatcaaaacgctgcgttttctaacggcttcgtcaacggctatctgaccatggatacgctgggcgcaatggtgtttggtatcgttattgttaacgcggcgcgttctcgtggcgttaccgaagcgcgtctgctgacccgttataccgtctgggctggcctgatggcgggtgttggtctgactctgctgtacctggcgctgttccgtctgggttcagacagcgcgtcgctggtcgatcagtctgcaaacggtgcggcgatcctgcatgcttacgttcagcatacctttggcggcggcggtagcttcctgctggcggcgttaatcttcatcgcctgcctggtcacggcggttggcctgacctgtgcttgtgcagaattcttcgcccagtacgtaccgctctcttatcgtacgctggtgtttatcctcggcggcttctcgatggtggtgtctaacctcggcttgagccagctgattcagatctctgtaccggtgctgaccgccatttatccgccgtgtatcgcactggttgtattaagttttacacgctcatggtggcataattcgtcccgcgtgattgctccgccgatgtttatcagcctgctttttggtattctcgacgggatcaaggcatctgcattcagcgatatcttaccgtcctgggcgcagcgtttaccgctggccgaacaaggtctggcgtggttaatgccaacagtggtgatggtggttctggccattatctgggatcgtgcggcaggtcgtcaggtgacctccagcgctcactaatacgcatggcatggatgaccgatggtagtgtgggctctccccatgcgagagtagggaactgccaggcatcaaataaaacgaaaggctcagtcgaaagactgggcctttcgttttatctgttgtttgtcggtgaacgctctcctgagtaggacaaatccgccgggagcggatttgaacgttgcgaagcaacggcccggagggtggcgggcaggacgcccgccataaactgccaggcatcaaattaagcagaaggccatcctgacggatggcctttttgcgtggccagtgccaagcttgcatgcgtgccagctgcattaatgaagaaatcatgctggaagaataacagctcactcaaaggcggtagtacgggttttgctgcccgcaaacgggctgttctggtgttgctagtttgttatcagaatcgcagatccggcttcagccggtttgccggctgaaagcgctatttcttccagaattgccatgattttttccccacgggaggcgtcactggctcccgtgttgtcggcagctttgattcgataagcagcatcgcctgtttcaggctgtctatgtgtgactgttgagctgtaacaagttgtctcaggtgttcaatttcatgttctagttgctttgttttactggtttcacctgttctattaggtgttacatgctgttcatctgttacattgtcgatctgttcatggtgaacagctttgaatgcaccaaaaactcgtaaaagctctgatgtatctatcttttttacaccgttttcatctgtgcatatggacagttttccctttgatatgtaacggtgaacagttgttctacttttgtttgttagtcttgatgcttcactgatagatacaagagccataagaacctcagatccttccgtatttagccagtatgttctctagtgtggttcgttgtttttgcgtgagccatgagaacgaaccattgagatcatacttactttgcatgtcactcaaaaattttgcctcaaaactggtgagctgaatttttgcagttaaagcatcgtgtagtgtttttcttagtccgttatgtaggtaggaatctgatgtaatggttgttggtattttgtcaccattcatttttatctggttgttctcaagttcggttacgagatccatttgtctatctagttcaacttggaaaatcaacgtatcagtcgggcggcctcgcttatcaaccaccaatttcatattgctgtaagtgtttaaatctttacttattggtttcaaaacccattggttaagccttttaaactcatggtagttattttcaagcattaacatgaacttaaattcatcaaggctaatctctatatttgccttgtgagttttcttttgtgttagttcttttaataaccactcataaatcctcatagagtatttgttttcaaaagacttaacatgttccagattatattttatgaatttttttaactggaaaagataaggcaatatctcttcactaaaaactaattctaatttttcgcttgagaacttggcatagtttgtccactggaaaatctcaaagcctttaaccaaaggattcctgatttccacagttctcgtcatcagctctctggttgctttagctaatacaccataagcattttccctactgatgttcatcatctgagcgtattggttataagtgaacgataccgtccgttctttccttgtagggttttcaatcgtggggttgagtagtgccacacagcataaaattagcttggtttcatgctccgttaagtcatagcgactaatcgctagttcatttgctttgaaaacaactaattcagacatacatctcaattggtctaggtgattttaatcactataccaattgagatgggctagtcaatgataattactagtccttttcctttgagttgtgggtatctgtaaattctgctagacctttgctggaaaacttgtaaattctgctagaccctctgtaaattccgctagacctttgtgtgttttttttgtttatattcaagtggttataatttatagaataaagaaagaataaaaaaagataaaaagaatagatcccagccctgtgtataactcactactttagtcagttccgcagtattacaaaaggatgtcgcaaacgctgtttgctcctctacaaaacagaccttaaaaccctaaaggcttaagtagcaccctcgcaagctcgggcaaatcgctgaatattccttttgtctccgaccatcaggcacctgagtcgctgtctttttcgtgacattcagttcgctgcgctcacggctctggcagtgaatgggggtaaatggcactacaggcgccttttatggattcatgcaaggaaactacccataatacaagaaaagcccgtcacgggcttctcagggcgttttatggcgggtctgctatgtggtgctatctgactttttgctgttcagcagttcctgccctctgattttccagtctgaccacttcggattatcccgtgacaggtcattcagactggctaatgcacccagtaaggcagcggtatcatcaacaggcttacccgtcttactgtcttttctacggggtctgacgctcagtggaacgaaaactcacgttaagggattttggtcatgagattatcaaaaaggatcttcacctagatccttttaaattaaaaatgaagttttaaatcaatctaaagtatatatgagtaaacttggtctgacagttaccaatgcttaatcagtgaggcacctatctcagcgatctgtctatttcgttcatccatagttgcctgactccccgtcgtgtagataactacgatacgggagggcttaccatctggccccagtgctgcaatgataccgcgagaaccacgctcaccggctccagatttatcagcaataaaccagccagccggaagggccgagcgcagaagtggtcctgcaactttatccgcctccatccagtctattaattgttgccgggaagctagagtaagtagttcgccagttaatagtttgcgcaacgttgttgccattgctacaggcatcgtggtgtcacgctcgtcgtttggtatggcttcattcagctccggttcccaacgatcaaggcgagttacatgatcccccatgttgtgcaaaaaagcggttagctccttcggtcctccgatcgttgtcagaagtaagttggccgcagtgttatcactcatggttatggcagcactgcataattctcttactgtcatgccatccgtaagatgcttttctgtgactggtgagtactcaaccaagtcattctgagaatagtgtatgcggcgaccgagttgctcttgcccggcgtcaatacgggataataccgcgccacatagcagaactttaaaagtgctcatcattggaaaacgttcttcggggcgaaaactctcaaggatcttaccgctgttgagatccagttcgatgtaacccactcgtgcacccaactgatcttcagcatcttttactttcaccagcgtttctgggtgagcaaaaacaggaaggcaaaatgccgcaaaaaagggaataagggcgacacggaaatgttgaatactcatactcttcctttttcaatattattgaagcatttatcagggttattgtctcatgagcggatacatatttgaatgtatttagaaaaataaacaaataggggttccgcgcacatttccccgaaaagtgccacctgacgtctaagaaaccattattatcatgacattaacctataaaaataggcgtatcacgaggccctttcgtctcgcgcgtttcggtgatgacggtgaaaacctctgacacatgcagctcccggagacggtcacagcttgtctgtaagcggatgccgggagcagacaagcccgtcagggcgcgtcagcgggtgttggcgggtgtcggggctggcttaactatgcggcatcagagcagattgtactgagagtgcaccatatgcggtgtgaaataccgcacagatgcgtaaggagaaaataccgcatcaggcgccattcgccattcaggctgcgcaactgttgggaagggcgatcggtgcgggcctcttcgctattacgccagctggcgaaagggggatgtgctgcaaggcgattaagttgggtaacgccagggttttcccagtcacgacgttgtaaaacgacggccagtgaattcgttaagacccactttcacatttaagttgtttttctaatccgcatatgatcaattcaaggccgaataagaaggctggctctgcaccttggtgatcaaataattcgatagcttgtcgtaataatggcggcatactatcagtagtaggtgtttccctttcttctttagcgacttgatgctcttgatcttccaatacgcaacctaaagtaaaatgccccacagcgctgagtgcatataatgcattctctagtgaaaaaccttgttggcataaaaaggctaattgattttcgagagtttcatactgtttttctgtaggccgtgtacctaaatgtacttttgctccatcgcgatgacttagtaaagcacatctaaaacttttagcgttattacgtaaaaaatcttgccagctttccccttctaaagggcaaaagtgagtatggtgcctatctaacatctcaatggctaaggcgtcgagcaaagcccgcttattttttacatgccaatacaatgtaggctgctctacacctagcttctgggcgagtttacgggttgttaaaccttcgattccgacctcattaagcagctctaatgcgctgttaatcactttacttttatctaatctagacatcattaattcctaatttttgttgacactctatcattgatagagttattttaccactccctatcagtgatagagaaaagtga

SEQ ID NO: 15 - DNA, 10058 bp, Artificial Sequence
  Description of Artificial Sequence: Synthetic polynucleotide
aatattcacgtaaggaggtaatagatgcagatcttcgacactttgcaatcaatgggccatgagcaggttgtcctatgtagcgataagaccacgggtctgcgcgccattatcgctatacacgatacatccttagggccggcgcttggtggtacccgtatgtggcagtatgcaactgacgacgatgctattactgacgcactccgtctgtctcggggcatgacctacaaagctgcggtttctggcgtaaatctgggcggtggtaaagccgttatcatcggaaaccctcacagtgataaaagcgaagcgctgtttcgcgcttacggcagaatggtggaatcccagcgtgggcgttacatcaccgccgaagacgttggtactagcgtacgtgatatggagtggattcgcatggaaaccaaatatgtaacgggcgtgggtggcaacggaggctctggtgacccctctccagttaccgctctgggtgtttactcgggcatgaaggcatgcgctaaatcagtctatggtactgatgcgctgagcggtaaaaggatcgtggttcagggcgcgggtaacgttgcatcccatctggttcacagtctggtaaaagaaggcgctgtggttttcgtcactgacatctacgaagaaaaggccaaagcattagcggctgaaacgggcgctaccgtgattcgcaccgacgaggtttttactacacaatgcgatatcttctctccgaacgctctgggggccgtcctgaacgatgaaactattccgcagctcacatgcgctatcgtagctggtggtgcaaacaatcagcttaaaatcgaacaacgtcacgccacggctctgcaagagaaaggcattctgtatgcgccggattacgtaatcaacgccgggggcctcatgaatgtggcgagcgaagttgacggctacaaccgtgaaaaggttatgcgccaggctgaaggtatttacgatattactatgaacatcctaaataccgcgcgtgagcgtaacatcctgaccatcgaagcatccaacgcgattgctgaagagcggatcaacaaagttcgccatgttcacgggaacttcatcggttccccgtctattcgcggagtataataaatcaaaacaccaaattaaggagaaattttatgtcgacgacaaccgttggtgactacttgctgtatcgcttaaacgaaatcggcattgagcacctcttcggagtgccaggtgattacaatctgcaatttctggatcatgtaatcgaccaccctcagctgacttgggtcggctgcactaacgaacttaacgctgcctacgcagctgatggttatgcgcgttgtcgtccggctgcggcactgctgaccaccttcggggttggcgaactgagcgctattaatggcatcgcaggttcctacgcggagtatctgccggtaatacatatcgttggtgcaccgagtctatcagcccagcagcagggcgacctgattcaccactctcttggcgaaggtgatttttccagcttcctgaggatgtcccaaccggtgtctgttgcgcaggctgctctgactcctgataacgcatgcaaggaaatcgaccgcgtactggcggaagtcctcattcagcgtcgtcccggctacctgctgctgtctaccgacgtggctgctgcgccggcggctctgccacaaagcactctttctttgccgaccgccccggatcatcgcgcagttctggctgctttcagcgacgctgctgagcagatgctggctcaggccaaaagcgtctctctactggcggactttctggctgatcgtttcggtgttactcgagcactggccgcgtggcttcagcaggttccgctaccgcacgccactctgttaatgggtaaaggcgttctgagtgaacagcaaccagggttcgtgggtacctacgctggtgcggcatctatcgattcgacgcgtggcgcaatcgaagaagctggggtaattatcggagtgggagttagattttccgacactatcacagcaggcttctcgcagcagatcgacgcccgccgttttatagacattcaacccttcttctctcgtattggcgatcgccagtttgatcacttgccgatgcaggctgccgtcgcagccctgcatcaactgtgtcttcgttatcagcagcagtggtctatcaccgctcctagcccgcctgcactgccgccggctgctggtagcgagctgtcccagaacgcattctggcaggcgatgcagaacttcatccgccctggggacctgttggtggccgaccaaggtactgcggcgttcggcgcagcggcgctgcgcttaccgcagaattgccagctgcttgtgcagccgctgtggggctcaatcggttacagtctgccggccacctttggtgctcagacggcagatacagagcgtcgtgtaatcctaatcattggcgatggttcagcgcaattaactattcaggaactttccagtatgatgcgtgacggcttgaaacctatcatctttctcctgaacaacaacggttacaccgttgaacgggcgattcacggcgcggagcaacgttataacgatatcgctgcttggaattggacccaactgccccaggcgctgagtgttcattgcccagcgcagagctggcgagtcgttgaaacggtgcagctgaccgacgtaatgaaagtcatcgctgcttctccgcgtctgagcttggtagaagttgttctgcctgcaatggatgtcccaccgctgctgcaagcagtgagtgccgctctgaaccagcgcaactcctcttaattcttaataataaggagctaattatgcagacggcgttcttgtataagccaggtcacgaaaacttagtgcgctcggagatcccgatacctaaagctgggcgtggcgaagtcgttctggaaattaaagccgctggcatgtgccattccgatctgcacgttctcgacggtggaatccccctgccgggtcaatttgtaatgggccatgaaatcgttggtactattcacgagatcggccaggacgtgaccggtttcaaacagggcgatctgtacgcagtccacggcccgaatccgtgtggtatttgcaccctgtgcagagaaggatttgataacgactgcactacagtggcgaaaaccggtcaatggttcggactgggtcttgacggcggctaccagaagtatatccgtatcccgaacgtaaggtctatcgttaaagttccagaaggtgtttcagctgaggcagctgcgagctgtactgatgcagtactgaccccgtaccgtgcactaaaacaggctggcgccagcaactctactcgggtactgattctgggtctgggtggcttaggtctgaatgcccttaaactggctaagaccttcggcagttacgtttacgcatctgacctgaaaccttctgcgcgtgaagctgctaaggccgctggggcggatgaagtgctggagtccctgcccgaagacccgctgggtgttgatatcgtgttagacgtcgttggcgtgcagagcaccttcaacctcgctcaaaaacacgttggcccgcgtggcatcattgtacctgtaggcctggcatccccacagctttcgtttaacctaacggatctggcgctccgcgaaattcgtgttcagggcactttttggggcacgagcaatgagctggctgaatgtctgcgcctgtgccagctgggcctgatcaacccgaaatatactgtggtgcctcttgaagaagcgccgaaatatatggaagcaatggctcatgggaaagtagaaggtcgtatcgttttccacccgtaagaaggagatatacatatgacccatcaattaagatcgcgcgatatcatcgctctgggctttatgacatttgcgttgttcgtcggcgcaggtaacattattttccctccaatggtcggcttgcaggcaggcgaacacgtctggactgcggcattcggcttcctcattactgccgttggcctaccggtattaacggtagtggcgctggcaaaagttggcggcggtgttgacagtctcagcacgccaattggtaaagtcgctggcgtactgctggcaacagtttgttacctggcggtggggccgctttttgctacgccgcgtacagctaccgtttcttttgaagtgggcattgcgccgctgacgggtgattccgcgctgccgctgtttatttacagcctggtctatttcgctatcgttattctggtttcgctctatccgggcaagctgctggataccgtgggcaacttccttgcgccgctgaaaattatcgcgctggtcatcctgtctgttgccgcaattatctggccggcgggttctatcagtacggcgactgaggcttatcaaaacgctgcgttttctaacggcttcgtcaacggctatctgaccatggatacgctgggcgcaatggtgtttggtatcgttattgttaacgcggcgcgttctcgtggcgttaccgaagcgcgtctgctgacccgttataccgtctgggctggcctgatggcgggtgttggtctgactctgctgtacctggcgctgttccgtctgggttcagacagcgcgtcgctggtcgatcagtctgcaaacggtgcggcgatcctgcatgcttacgttcagcatacctttggcggcggcggtagcttcctgctggcggcgttaatcttcatcgcctgcctggtcacggcggttggcctgacctgtgcttgtgcagaattcttcgcccagtacgtaccgctctcttatcgtacgctggtgtttatcctcggcggcttctcgatggtggtgtctaacctcggcttgagccagctgattcagatctctgtaccggtgctgaccgccatttatccgccgtgtatcgcactggttgtattaagttttacacgctcatggtggcataattcgtcccgcgtgattgctccgccgatgtttatcagcctgctttttggtattctcgacgggatcaaggcatctgcattcagcgatatcttaccgtcctgggcgcagcgtttaccgctggccgaacaaggtctggcgtggttaatgccaacagtggtgatggtggttctggccattatctgggatcgtgcggcaggtcgtcaggtgacctccagcgctcactaatacgcatggcatggatgaccgatggtagtgtgggctctccccatgcgagagtagggaactgccaggcatcaaataaaacgaaaggctcagtcgaaagactgggcctttcgttttatctgttgtttgtcggtgaacgctctcctgagtaggacaaatccgccgggagcggatttgaacgttgcgaagcaacggcccggagggtggcgggcaggacgcccgccataaactgccaggcatcaaattaagcagaaggccatcctgacggatggcctttttgcgtggccagtgccaagcttgcatgcgtgccagctgcattaatgaagaaatcatgctggaagaataacagctcactcaaaggcggtagtacgggttttgctgcccgcaaacgggctgttctggtgttgctagtttgttatcagaatcgcagatccggcttcagccggtttgccggctgaaagcgctatttcttccagaattgccatgattttttccccacgggaggcgtcactggctcccgtgttgtcggcagctttgattcgataagcagcatcgcctgtttcaggctgtctatgtgtgactgttgagctgtaacaagttgtctcaggtgttcaatttcatgttctagttgctttgttttactggtttcacctgttctattaggtgttacatgctgttcatctgttacattgtcgatctgttcatggtgaacagctttgaatgcaccaaaaactcgtaaaagctctgatgtatctatcttttttacaccgttttcatctgtgcatatggacagttttccctttgatatgtaacggtgaacagttgttctacttttgtttgttagtcttgatgcttcactgatagatacaagagccataagaacctcagatccttccgtatttagccagtatgttctctagtgtggttcgttgtttttgcgtgagccatgagaacgaaccattgagatcatacttactttgcatgtcactcaaaaattttgcctcaaaactggtgagctgaatttttgcagttaaagcatcgtgtagtgtttttcttagtccgttatgtaggtaggaatctgatgtaatggttgttggtattttgtcaccattcatttttatctggttgttctcaagttcggttacgagatccatttgtctatctagttcaacttggaaaatcaacgtatcagtcgggcggcctcgcttatcaaccaccaatttcatattgctgtaagtgtttaaatctttacttattggtttcaaaacccattggttaagccttttaaactcatggtagttattttcaagcattaacatgaacttaaattcatcaaggctaatctctatatttgccttgtgagttttcttttgtgttagttcttttaataaccactcataaatcctcatagagtatttgttttcaaaagacttaacatgttccagattatattttatgaatttttttaactggaaaagataaggcaatatctcttcactaaaaactaattctaatttttcgcttgagaacttggcatagtttgtccactggaaaatctcaaagcctttaaccaaaggattcctgatttccacagttctcgtcatcagctctctggttgctttagctaatacaccataagcattttccctactgatgttcatcatctgagcgtattggttataagtgaacgataccgtccgttctttccttgtagggttttcaatcgtggggttgagtagtgccacacagcataaaattagcttggtttcatgctccgttaagtcatagcgactaatcgctagttcatttgctttgaaaacaactaattcagacatacatctcaattggtctaggtgattttaatcactataccaattgagatgggctagtcaatgataattactagtccttttcctttgagttgtgggtatctgtaaattctgctagacctttgctggaaaacttgtaaattctgctagaccctctgtaaattccgctagacctttgtgtgttttttttgtttatattcaagtggttataatttatagaataaagaaagaataaaaaaagataaaaagaatagatcccagccctgtgtataactcactactttagtcagttccgcagtattacaaaaggatgtcgcaaacgctgtttgctcctctacaaaacagaccttaaaaccctaaaggcttaagtagcaccctcgcaagctcgggcaaatcgctgaatattccttttgtctccgaccatcaggcacctgagtcgctgtctttttcgtgacattcagttcgctgcgctcacggctctggcagtgaatgggggtaaatggcactacaggcgccttttatggattcatgcaaggaaactacccataatacaagaaaagcccgtcacgggcttctcagggcgttttatggcgggtctgctatgtggtgctatctgactttttgctgttcagcagttcctgccctctgattttccagtctgaccacttcggattatcccgtgacaggtcattcagactggctaatgcacccagtaaggcagcggtatcatcaacaggcttacccgtcttactgtcttttctacggggtctgacgctcagtggaacgaaaactcacgttaagggattttggtcatgagattatcaaaaaggatcttcacctagatccttttaaattaaaaatgaagttttaaatcaatctaaagtatatatgagtaaacttggtctgacagttaccaatgcttaatcagtgaggcacctatctcagcgatctgtctatttcgttcatccatagttgcctgactccccgtcgtgtagataactacgatacgggagggcttaccatctggccccagtgctgcaatgataccgcgagaaccacgctcaccggctccagatttatcagcaataaaccagccagccggaagggccgagcgcagaagtggtcctgcaactttatccgcctccatccagtctattaattgttgccgggaagctagagtaagtagttcgccagttaatagtttgcgcaacgttgttgccattgctacaggcatcgtggtgtcacgctcgtcgtttggtatggcttcattcagctccggttcccaacgatcaaggcgagttacatgatcccccatgttgtgcaaaaaagcggttagctccttcggtcctccgatcgttgtcagaagtaagttggccgcagtgttatcactcatggttatggcagcactgcataattctcttactgtcatgccatccgtaagatgcttttctgtgactggtgagtactcaaccaagtcattctgagaatagtgtatgcggcgaccgagttgctcttgcccggcgtcaatacgggataataccgcgccacatagcagaactttaaaagtgctcatcattggaaaacgttcttcggggcgaaaactctcaaggatcttaccgctgttgagatccagttcgatgtaacccactcgtgcacccaactgatcttcagcatcttttactttcaccagcgtttctgggtgagcaaaaacaggaaggcaaaatgccgcaaaaaagggaataagggcgacacggaaatgttgaatactcatactcttcctttttcaatattattgaagcatttatcagggttattgtctcatgagcggatacatatttgaatgtatttagaaaaataaacaaataggggttccgcgcacatttccccgaaaagtgccacctgacgtctaagaaaccattattatcatgacattaacctataaaaataggcgtatcacgaggccctttcgtctcgcgcgtttcggtgatgacggtgaaaacctctgacacatgcagctcccggagacggtcacagcttgtctgtaagcggatgccgggagcagacaagcccgtcagggcgcgtcagcgggtgttggcgggtgtcggggctggcttaactatgcggcatcagagcagattgtactgagagtgcaccatatgcggtgtgaaataccgcacagatgcgtaaggagaaaataccgcatcaggcgccattcgccattcaggctgcgcaactgttgggaagggcgatcggtgcgggcctcttcgctattacgccagctggcgaaagggggatgtgctgcaaggcgattaagttgggtaacgccagggttttcccagtcacgacgttgtaaaacgacggccagtgaattcgttaagacccactttcacatttaagttgtttttctaatccgcatatgatcaattcaaggccgaataagaaggctggctctgcaccttggtgatcaaataattcgatagcttgtcgtaataatggcggcatactatcagtagtaggtgtttccctttcttctttagcgacttgatgctcttgatcttccaatacgcaacctaaagtaaaatgccccacagcgctgagtgcatataatgcattctctagtgaaaaaccttgttggcataaaaaggctaattgattttcgagagtttcatactgtttttctgtaggccgtgtacctaaatgtacttttgctccatcgcgatgacttagtaaagcacatctaaaacttttagcgttattacgtaaaaaatcttgccagctttccccttctaaagggcaaaagtgagtatggtgcctatctaacatctcaatggctaaggcgtcgagcaaagcccgcttattttttacatgccaatacaatgtaggctgctctacacctagcttctgggcgagtttacgggttgttaaaccttcgattccgacctcattaagcagctctaatgcgctgttaatcactttacttttatctaatctagacatcattaattcctaatttttgttgacactctatcattgatagagttattttaccactccctatcagtgatagagaaaagtga

SEQ ID NO: 16 - DNA, 10136 bp, Artificial Sequence
  Description of Artificial Sequence: Synthetic polynucleotide
gataaacgaatcacaaaggcgaggcaagatgaacatcttcaagaaaatggaggaatttaattatgaacaactggtctacttctacgacagcgaaacggaactcaaaggtattacctgtatacacaacacaactttagggccggcattgggcggtacccgcctttggaactataactctgaggaagatgccgttgaagacgtaatccgtctggctcggggcatgacttacaaagcggcttgcgccggtctgaatctgggcggcggtaaaaccgtgctgatcggtgatgctaaaaagattaaatcagagtcctacttccgtggactggggcgctacgttcagtcgctgaacggcagatatatcaccgcggaagacgtaaatacttctacgaaggatatggcatacgttgctatggaaactgactatgtggtaggcctgggaggtaaatccggcaaccctagtccagttactgcttacggtgcatttatgggtatcaaagcggcgctgatgaaaaaatttgaggatagctctattgaaggccgaaccttcgcagtgcagggtgctgggcagacgggttactatcttatcgattacctcctaggcaacaacaagttcaaagaaaaggctaaaaagatttacttcaccgaaattaacgagagctatatcgagcgtatgaacaaagaacatccggaagttgaatttatttccccggacaaaatctactcgctggaagtagacgtcttcgtgccctgcgccctgggcaaaatcgttaatgacaaaactatcgatgaatttaagtgtccgatcatcgcaggtactgcaaacaacgtactggaaagggaagcgcacggcaacatgcttaaagaacgtggcattctttacgccccggactatgtgatcaatgctggtgggctgatcaacgtttaccacgagctgaacggttacaataaagagaacgctattctggaagtggaattaatttatgatcgcctactggaaatattcaacatcgctgattctctgaacatcagcaccaatatcgctgccaacgagttcgcggaaaaacgtatcaagcaaattaagtccttgaaaaacaacttcattaaacgctaagaccattaataaggaacattttatgtcgacgacaaccgttggtgactacttgctgtatcgcttaaacgaaatcggcattgagcacctcttcggagtgccaggtgattacaatctgcaatttctggatcatgtaatcgaccaccctcagctgacttgggtcggctgcactaacgaacttaacgctgcctacgcagctgatggttatgcgcgttgtcgtccggctgcggcactgctgaccaccttcggggttggcgaactgagcgctattaatggcatcgcaggttcctacgcggagtatctgccggtaatacatatcgttggtgcaccgagtctatcagcccagcagcagggcgacctgattcaccactctcttggcgaaggtgatttttccagcttcctgaggatgtcccaaccggtgtctgttgcgcaggctgctctgactcctgataacgcatgcaaggaaatcgaccgcgtactggcggaagtcctcattcagcgtcgtcccggctacctgctgctgtctaccgacgtggctgctgcgccggcggctctgccacaaagcactctttctttgccgaccgccccggatcatcgcgcagttctggctgctttcagcgacgctgctgagcagatgctggctcaggccaaaagcgtctctctactggcggactttctggctgatcgtttcggtgttactcgagcactggccgcgtggcttcagcaggttccgctaccgcacgccactctgttaatgggtaaaggcgttctgagtgaacagcaaccagggttcgtgggtacctacgctggtgcggcatctatcgattcgacgcgtggcgcaatcgaagaagctggggtaattatcggagtgggagttagattttccgacactatcacagcaggcttctcgcagcagatcgacgcccgccgttttatagacattcaacccttcttctctcgtattggcgatcgccagtttgatcacttgccgatgcaggctgccgtcgcagccctgcatcaactgtgtcttcgttatcagcagcagtggtctatcaccgctcctagcccgcctgcactgccgccggctgctggtagcgagctgtcccagaacgcattctggcaggcgatgcagaacttcatccgccctggggacctgttggtggccgaccaaggtactgcggcgttcggcgcagcggcgctgcgcttaccgcagaattgccagctgcttgtgcagccgctgtggggctcaatcggttacagtctgccggccacctttggtgctcagacggcagatacagagcgtcgtgtaatcctaatcattggcgatggttcagcgcaattaactattcaggaactttccagtatgatgcgtgacggcttgaaacctatcatctttctcctgaacaacaacggttacaccgttgaacgggcgattcacggcgcggagcaacgttataacgatatcgctgcttggaattggacccaactgccccaggcgctgagtgttcattgcccagcgcagagctggcgagtcgttgaaacggtgcagctgaccgacgtaatgaaagtcatcgctgcttctccgcgtctgagcttggtagaagttgttctgcctgcaatggatgtcccaccgctgctgcaagcagtgagtgccgctctgaaccagcgcaactcctcttaattggataaagaataaggaggtattttatgacagcggagcagcaaaatggggtatccgactcacgccgtttcgaatttcaggaatttggtggccctatcgccccacagacctatcagctccccgcaccggctagcgatgaagttttgttaaaggtgaactactgcggtgtctgtcacagtgatgttcatcttcacgacggctacttcgagctgggtggcgataaacgtctgaacttcgctatgccgctgccgctgacgctgggtcacgaagtaattggcaccgttgtggctgtcggcgaccaggttactggtgtaaaaccgggggaccagcgactgatctatccgtggataggttgcggaaaatgcggcgcgtgtcaaaaaggagaagaaaacctgtgcgttactcctgcacatctgggcgtgaacaagccgggcggttacgctgatcacatcgttgtaccccattctcgctaccttctggacatttcgggtctgaacccgggtgatgccgctaccctcgcgtgctccggcctgaccactttcagcgcgatcaacaaagtgttgccgcttgcagatgaccagtggattgttgttatcggttgtggtggcctcggccagatggcgctgcgtatcctgcaagctatgggaattggcaatgttatcggtattgacctgtctgaagagaaacggaaactggctcatgaaagcggtgcacgtcactccttcgatccaaacactccgaagctgaaccgcgtggtcgccgaaacctgcccgggtacggtacaggccgcgttagactttgtgggcaatgagcaaactgctcagctggcactgtctctgcttggaaaaggtggcaaatatgttcctgtcgggctgcacggcggcgagctgcgttacccattgccgatcatcacgaacaaagctgtaagtatcatcggttcttacgttggtaccctgaaagaactggaagacttagttgctttcgccaaggaaaagaatctgccgccaattcatattgaacaccgcccgctggaatcggcggctcaggccgtagaggacctggaaaaaggacaggttgctgggcgtgttatcctggatgcaggtaactaagaaggagatatacatatgacccatcaattaagatcgcgcgatatcatcgctctgggctttatgacatttgcgttgttcgtcggcgcaggtaacattattttccctccaatggtcggcttgcaggcaggcgaacacgtctggactgcggcattcggcttcctcattactgccgttggcctaccggtattaacggtagtggcgctggcaaaagttggcggcggtgttgacagtctcagcacgccaattggtaaagtcgctggcgtactgctggcaacagtttgttacctggcggtggggccgctttttgctacgccgcgtacagctaccgtttcttttgaagtgggcattgcgccgctgacgggtgattccgcgctgccgctgtttatttacagcctggtctatttcgctatcgttattctggtttcgctctatccgggcaagctgctggataccgtgggcaacttccttgcgccgctgaaaattatcgcgctggtcatcctgtctgttgccgcaattatctggccggcgggttctatcagtacggcgactgaggcttatcaaaacgctgcgttttctaacggcttcgtcaacggctatctgaccatggatacgctgggcgcaatggtgtttggtatcgttattgttaacgcggcgcgttctcgtggcgttaccgaagcgcgtctgctgacccgttataccgtctgggctggcctgatggcgggtgttggtctgactctgctgtacctggcgctgttccgtctgggttcagacagcgcgtcgctggtcgatcagtctgcaaacggtgcggcgatcctgcatgcttacgttcagcatacctttggcggcggcggtagcttcctgctggcggcgttaatcttcatcgcctgcctggtcacggcggttggcctgacctgtgcttgtgcagaattcttcgcccagtacgtaccgctctcttatcgtacgctggtgtttatcctcggcggcttctcgatggtggtgtctaacctcggcttgagccagctgattcagatctctgtaccggtgctgaccgccatttatccgccgtgtatcgcactggttgtattaagttttacacgctcatggtggcataattcgtcccgcgtgattgctccgccgatgtttatcagcctgctttttggtattctcgacgggatcaaggcatctgcattcagcgatatcttaccgtcctgggcgcagcgtttaccgctggccgaacaaggtctggcgtggttaatgccaacagtggtgatggtggttctggccattatctgggatcgtgcggcaggtcgtcaggtgacctccagcgctcactaatacgcatggcatggatgaccgatggtagtgtgggctctccccatgcgagagtagggaactgccaggcatcaaataaaacgaaaggctcagtcgaaagactgggcctttcgttttatctgttgtttgtcggtgaacgctctcctgagtaggacaaatccgccgggagcggatttgaacgttgcgaagcaacggcccggagggtggcgggcaggacgcccgccataaactgccaggcatcaaattaagcagaaggccatcctgacggatggcctttttgcgtggccagtgccaagcttgcatgcgtgccagctgcattaatgaagaaatcatgctggaagaataacagctcactcaaaggcggtagtacgggttttgctgcccgcaaacgggctgttctggtgttgctagtttgttatcagaatcgcagatccggcttcagccggtttgccggctgaaagcgctatttcttccagaattgccatgattttttccccacgggaggcgtcactggctcccgtgttgtcggcagctttgattcgataagcagcatcgcctgtttcaggctgtctatgtgtgactgttgagctgtaacaagttgtctcaggtgttcaatttcatgttctagttgctttgttttactggtttcacctgttctattaggtgttacatgctgttcatctgttacattgtcgatctgttcatggtgaacagctttgaatgcaccaaaaactcgtaaaagctctgatgtatctatcttttttacaccgttttcatctgtgcatatggacagttttccctttgatatgtaacggtgaacagttgttctacttttgtttgttagtcttgatgcttcactgatagatacaagagccataagaacctcagatccttccgtatttagccagtatgttctctagtgtggttcgttgtttttgcgtgagccatgagaacgaaccattgagatcatacttactttgcatgtcactcaaaaattttgcctcaaaactggtgagctgaatttttgcagttaaagcatcgtgtagtgtttttcttagtccgttatgtaggtaggaatctgatgtaatggttgttggtattttgtcaccattcatttttatctggttgttctcaagttcggttacgagatccatttgtctatctagttcaacttggaaaatcaacgtatcagtcgggcggcctcgcttatcaaccaccaatttcatattgctgtaagtgtttaaatctttacttattggtttcaaaacccattggttaagccttttaaactcatggtagttattttcaagcattaacatgaacttaaattcatcaaggctaatctctatatttgccttgtgagttttcttttgtgttagttcttttaataaccactcataaatcctcatagagtatttgttttcaaaagacttaacatgttccagattatattttatgaatttttttaactggaaaagataaggcaatatctcttcactaaaaactaattctaatttttcgcttgagaacttggcatagtttgtccactggaaaatctcaaagcctttaaccaaaggattcctgatttccacagttctcgtcatcagctctctggttgctttagctaatacaccataagcattttccctactgatgttcatcatctgagcgtattggttataagtgaacgataccgtccgttctttccttgtagggttttcaatcgtggggttgagtagtgccacacagcataaaattagcttggtttcatgctccgttaagtcatagcgactaatcgctagttcatttgctttgaaaacaactaattcagacatacatctcaattggtctaggtgattttaatcactataccaattgagatgggctagtcaatgataattactagtccttttcctttgagttgtgggtatctgtaaattctgctagacctttgctggaaaacttgtaaattctgctagaccctctgtaaattccgctagacctttgtgtgttttttttgtttatattcaagtggttataatttatagaataaagaaagaataaaaaaagataaaaagaatagatcccagccctgtgtataactcactactttagtcagttccgcagtattacaaaaggatgtcgcaaacgctgtttgctcctctacaaaacagaccttaaaaccctaaaggcttaagtagcaccctcgcaagctcgggcaaatcgctgaatattccttttgtctccgaccatcaggcacctgagtcgctgtctttttcgtgacattcagttcgctgcgctcacggctctggcagtgaatgggggtaaatggcactacaggcgccttttatggattcatgcaaggaaactacccataatacaagaaaagcccgtcacgggcttctcagggcgttttatggcgggtctgctatgtggtgctatctgactttttgctgttcagcagttcctgccctctgattttccagtctgaccacttcggattatcccgtgacaggtcattcagactggctaatgcacccagtaaggcagcggtatcatcaacaggcttacccgtcttactgtcttttctacggggtctgacgctcagtggaacgaaaactcacgttaagggattttggtcatgagattatcaaaaaggatcttcacctagatccttttaaattaaaaatgaagttttaaatcaatctaaagtatatatgagtaaacttggtctgacagttaccaatgcttaatcagtgaggcacctatctcagcgatctgtctatttcgttcatccatagttgcctgactccccgtcgtgtagataactacgatacgggagggcttaccatctggccccagtgctgcaatgataccgcgagaaccacgctcaccggctccagatttatcagcaataaaccagccagccggaagggccgagcgcagaagtggtcctgcaactttatccgcctccatccagtctattaattgttgccgggaagctagagtaagtagttcgccagttaatagtttgcgcaacgttgttgccattgctacaggcatcgtggtgtcacgctcgtcgtttggtatggcttcattcagctccggttcccaacgatcaaggcgagttacatgatcccccatgttgtgcaaaaaagcggttagctccttcggtcctccgatcgttgtcagaagtaagttggccgcagtgttatcactcatggttatggcagcactgcataattctcttactgtcatgccatccgtaagatgcttttctgtgactggtgagtactcaaccaagtcattctgagaatagtgtatgcggcgaccgagttgctcttgcccggcgtcaatacgggataataccgcgccacatagcagaactttaaaagtgctcatcattggaaaacgttcttcggggcgaaaactctcaaggatcttaccgctgttgagatccagttcgatgtaacccactcgtgcacccaactgatcttcagcatcttttactttcaccagcgtttctgggtgagcaaaaacaggaaggcaaaatgccgcaaaaaagggaataagggcgacacggaaatgttgaatactcatactcttcctttttcaatattattgaagcatttatcagggttattgtctcatgagcggatacatatttgaatgtatttagaaaaataaacaaataggggttccgcgcacatttccccgaaaagtgccacctgacgtctaagaaaccattattatcatgacattaacctataaaaataggcgtatcacgaggccctttcgtctcgcgcgtttcggtgatgacggtgaaaacctctgacacatgcagctcccggagacggtcacagcttgtctgtaagcggatgccgggagcagacaagcccgtcagggcgcgtcagcgggtgttggcgggtgtcggggctggcttaactatgcggcatcagagcagattgtactgagagtgcaccatatgcggtgtgaaataccgcacagatgcgtaaggagaaaataccgcatcaggcgccattcgccattcaggctgcgcaactgttgggaagggcgatcggtgcgggcctcttcgctattacgccagctggcgaaagggggatgtgctgcaaggcgattaagttgggtaacgccagggttttcccagtcacgacgttgtaaaacgacggccagtgaattcgttaagacccactttcacatttaagttgtttttctaatccgcatatgatcaattcaaggccgaataagaaggctggctctgcaccttggtgatcaaataattcgatagcttgtcgtaataatggcggcatactatcagtagtaggtgtttccctttcttctttagcgacttgatgctcttgatcttccaatacgcaacctaaagtaaaatgccccacagcgctgagtgcatataatgcattctctagtgaaaaaccttgttggcataaaaaggctaattgattttcgagagtttcatactgtttttctgtaggccgtgtacctaaatgtacttttgctccatcgcgatgacttagtaaagcacatctaaaacttttagcgttattacgtaaaaaatcttgccagctttccccttctaaagggcaaaagtgagtatggtgcctatctaacatctcaatggctaaggcgtcgagcaaagcccgcttattttttacatgccaatacaatgtaggctgctctacacctagcttctgggcgagtttacgggttgttaaaccttcgattccgacctcattaagcagctctaatgcgctgttaatcactttacttttatctaatctagacatcattaattcctaatttttgttgacactctatcattgatagagttattttaccactccctatcagtgatagagaaaagtga

SEQ ID NO: 17 - DNA, 10118 bp, Artificial Sequence
  Description of Artificial Sequence: Synthetic polynucleotide
gagctagataataaggacggcacaagatgaacatcttcaagaaaatggaggaatttaattatgaacaactggtctacttctacgacagcgaaacggaactcaaaggtattacctgtatacacaacacaactttagggccggcattgggcggtacccgcctttggaactataactctgaggaagatgccgttgaagacgtaatccgtctggctcggggcatgacttacaaagcggcttgcgccggtctgaatctgggcggcggtaaaaccgtgctgatcggtgatgctaaaaagattaaatcagagtcctacttccgtggactggggcgctacgttcagtcgctgaacggcagatatatcaccgcggaagacgtaaatacttctacgaaggatatggcatacgttgctatggaaactgactatgtggtaggcctgggaggtaaatccggcaaccctagtccagttactgcttacggtgcatttatgggtatcaaagcggcgctgatgaaaaaatttgaggatagctctattgaaggccgaaccttcgcagtgcagggtgctgggcagacgggttactatcttatcgattacctcctaggcaacaacaagttcaaagaaaaggctaaaaagatttacttcaccgaaattaacgagagctatatcgagcgtatgaacaaagaacatccggaagttgaatttatttccccggacaaaatctactcgctggaagtagacgtcttcgtgccctgcgccctgggcaaaatcgttaatgacaaaactatcgatgaatttaagtgtccgatcatcgcaggtactgcaaacaacgtactggaaagggaagcgcacggcaacatgcttaaagaacgtggcattctttacgccccggactatgtgatcaatgctggtgggctgatcaacgtttaccacgagctgaacggttacaataaagagaacgctattctggaagtggaattaatttatgatcgcctactggaaatattcaacatcgctgattctctgaacatcagcaccaatatcgctgccaacgagttcgcggaaaaacgtatcaagcaaattaagtccttgaaaaacaacttcattaaacgctaagaccattaataaggaacattttatgtcgacgacaaccgttggtgactacttgctgtatcgcttaaacgaaatcggcattgagcacctcttcggagtgccaggtgattacaatctgcaatttctggatcatgtaatcgaccaccctcagctgacttgggtcggctgcactaacgaacttaacgctgcctacgcagctgatggttatgcgcgttgtcgtccggctgcggcactgctgaccaccttcggggttggcgaactgagcgctattaatggcatcgcaggttcctacgcggagtatctgccggtaatacatatcgttggtgcaccgagtctatcagcccagcagcagggcgacctgattcaccactctcttggcgaaggtgatttttccagcttcctgaggatgtcccaaccggtgtctgttgcgcaggctgctctgactcctgataacgcatgcaaggaaatcgaccgcgtactggcggaagtcctcattcagcgtcgtcccggctacctgctgctgtctaccgacgtggctgctgcgccggcggctctgccacaaagcactctttctttgccgaccgccccggatcatcgcgcagttctggctgctttcagcgacgctgctgagcagatgctggctcaggccaaaagcgtctctctactggcggactttctggctgatcgtttcggtgttactcgagcactggccgcgtggcttcagcaggttccgctaccgcacgccactctgttaatgggtaaaggcgttctgagtgaacagcaaccagggttcgtgggtacctacgctggtgcggcatctatcgattcgacgcgtggcgcaatcgaagaagctggggtaattatcggagtgggagttagattttccgacactatcacagcaggcttctcgcagcagatcgacgcccgccgttttatagacattcaacccttcttctctcgtattggcgatcgccagtttgatcacttgccgatgcaggctgccgtcgcagccctgcatcaactgtgtcttcgttatcagcagcagtggtctatcaccgctcctagcccgcctgcactgccgccggctgctggtagcgagctgtcccagaacgcattctggcaggcgatgcagaacttcatccgccctggggacctgttggtggccgaccaaggtactgcggcgttcggcgcagcggcgctgcgcttaccgcagaattgccagctgcttgtgcagccgctgtggggctcaatcggttacagtctgccggccacctttggtgctcagacggcagatacagagcgtcgtgtaatcctaatcattggcgatggttcagcgcaattaactattcaggaactttccagtatgatgcgtgacggcttgaaacctatcatctttctcctgaacaacaacggttacaccgttgaacgggcgattcacggcgcggagcaacgttataacgatatcgctgcttggaattggacccaactgccccaggcgctgagtgttcattgcccagcgcagagctggcgagtcgttgaaacggtgcagctgaccgacgtaatgaaagtcatcgctgcttctccgcgtctgagcttggtagaagttgttctgcctgcaatggatgtcccaccgctgctgcaagcagtgagtgccgctctgaaccagcgcaactcctcttaatttttaaagtaacacacgagctaagaactaaggaggatttatgcgcagcatgcagtttgatgagtacggtgcacccctgaaagcgttctcatatgaagacccgaccccgcaagggaaggaagtagtcgttaggatcgaagcctgtggtgtgtgccactctgatattcatcttcacgagggctacttcgacatgggcggtggcaataaagctgatgttactcgtgctcgcgaactcccttttacattgggtcatgaaatcgttggcgaagtggtagcaactggaccaggtgtcaccggcgctaaaccgggcgacaaacgtattgtgtacccgtggatcgggtgcggcgactgcccgaaatgcaacagtggtgaggatcagtcctgtgcgcgtccacgtaacctgggtgttcacgttgacggtggctattcgacgcacgtaaagataccggacgaaaaattcctgttcgcctacgatggtattcctactgagttagcgggaacctatgcttgcagcggcatcaccgcttatggtgcactgatgaaagcaaaggaagcggctgaaagatctggctacatcggtctgattggcgctggtggcgttggcatggctggtctgatgctggccaaagcagcgatcggggctaaaactgtagtctttgatatcgacgacgcaaaactggaagctgcgacccgtgccggggcggattacgtgttcaactccggtgcaaaagaaacacgcaaggaagttatgaaactaacgaatggtggcctgtctggtgctgttgatttcgttggcagcgataaaagcgctctgtttggaatcaacgccttgggtcagaacggcgtgctggtcataattggactgttcggtggcgctatgactgttccggtacccctgttcccgctgaaagggatcaccgtacgtggctcatacgtaggttccctgcaagagatgagtgatatgatggagttagttcgcgctgggaaagttcctccgatgccggtaaaaactcggccactggacgctgcctgggaaacccttgaggatctacgccatggtaaaatcgtgggccgtgttgttctgaccccataagaaggagatatacatatgacccatcaattaagatcgcgcgatatcatcgctctgggctttatgacatttgcgttgttcgtcggcgcaggtaacattattttccctccaatggtcggcttgcaggcaggcgaacacgtctggactgcggcattcggcttcctcattactgccgttggcctaccggtattaacggtagtggcgctggcaaaagttggcggcggtgttgacagtctcagcacgccaattggtaaagtcgctggcgtactgctggcaacagtttgttacctggcggtggggccgctttttgctacgccgcgtacagctaccgtttcttttgaagtgggcattgcgccgctgacgggtgattccgcgctgccgctgtttatttacagcctggtctatttcgctatcgttattctggtttcgctctatccgggcaagctgctggataccgtgggcaacttccttgcgccgctgaaaattatcgcgctggtcatcctgtctgttgccgcaattatctggccggcgggttctatcagtacggcgactgaggcttatcaaaacgctgcgttttctaacggcttcgtcaacggctatctgaccatggatacgctgggcgcaatggtgtttggtatcgttattgttaacgcggcgcgttctcgtggcgttaccgaagcgcgtctgctgacccgttataccgtctgggctggcctgatggcgggtgttggtctgactctgctgtacctggcgctgttccgtctgggttcagacagcgcgtcgctggtcgatcagtctgcaaacggtgcggcgatcctgcatgcttacgttcagcatacctttggcggcggcggtagcttcctgctggcggcgttaatcttcatcgcctgcctggtcacggcggttggcctgacctgtgcttgtgcagaattcttcgcccagtacgtaccgctctcttatcgtacgctggtgtttatcctcggcggcttctcgatggtggtgtctaacctcggcttgagccagctgattcagatctctgtaccggtgctgaccgccatttatccgccgtgtatcgcactggttgtattaagttttacacgctcatggtggcataattcgtcccgcgtgattgctccgccgatgtttatcagcctgctttttggtattctcgacgggatcaaggcatctgcattcagcgatatcttaccgtcctgggcgcagcgtttaccgctggccgaacaaggtctggcgtggttaatgccaacagtggtgatggtggttctggccattatctgggatcgtgcggcaggtcgtcaggtgacctccagcgctcactaatacgcatggcatggatgaccgatggtagtgtgggctctccccatgcgagagtagggaactgccaggcatcaaataaaacgaaaggctcagtcgaaagactgggcctttcgttttatctgttgtttgtcggtgaacgctctcctgagtaggacaaatccgccgggagcggatttgaacgttgcgaagcaacggcccggagggtggcgggcaggacgcccgccataaactgccaggcatcaaattaagcagaaggccatcctgacggatggcctttttgcgtggccagtgccaagcttgcatgcgtgccagctgcattaatgaagaaatcatgctggaagaataacagctcactcaaaggcggtagtacgggttttgctgcccgcaaacgggctgttctggtgttgctagtttgttatcagaatcgcagatccggcttcagccggtttgccggctgaaagcgctatttcttccagaattgccatgattttttccccacgggaggcgtcactggctcccgtgttgtcggcagctttgattcgataagcagcatcgcctgtttcaggctgtctatgtgtgactgttgagctgtaacaagttgtctcaggtgttcaatttcatgttctagttgctttgttttactggtttcacctgttctattaggtgttacatgctgttcatctgttacattgtcgatctgttcatggtgaacagctttgaatgcaccaaaaactcgtaaaagctctgatgtatctatcttttttacaccgttttcatctgtgcatatggacagttttccctttgatatgtaacggtgaacagttgttctacttttgtttgttagtcttgatgcttcactgatagatacaagagccataagaacctcagatccttccgtatttagccagtatgttctctagtgtggttcgttgtttttgcgtgagccatgagaacgaaccattgagatcatacttactttgcatgtcactcaaaaattttgcctcaaaactggtgagctgaatttttgcagttaaagcatcgtgtagtgtttttcttagtccgttatgtaggtaggaatctgatgtaatggttgttggtattttgtcaccattcatttttatctggttgttctcaagttcggttacgagatccatttgtctatctagttcaacttggaaaatcaacgtatcagtcgggcggcctcgcttatcaaccaccaatttcatattgctgtaagtgtttaaatctttacttattggtttcaaaacccattggttaagccttttaaactcatggtagttattttcaagcattaacatgaacttaaattcatcaaggctaatctctatatttgccttgtgagttttcttttgtgttagttcttttaataaccactcataaatcctcatagagtatttgttttcaaaagacttaacatgttccagattatattttatgaatttttttaactggaaaagataaggcaatatctcttcactaaaaactaattctaatttttcgcttgagaacttggcatagtttgtccactggaaaatctcaaagcctttaaccaaaggattcctgatttccacagttctcgtcatcagctctctggttgctttagctaatacaccataagcattttccctactgatgttcatcatctgagcgtattggttataagtgaacgataccgtccgttctttccttgtagggttttcaatcgtggggttgagtagtgccacacagcataaaattagcttggtttcatgctccgttaagtcatagcgactaatcgctagttcatttgctttgaaaacaactaattcagacatacatctcaattggtctaggtgattttaatcactataccaattgagatgggctagtcaatgataattactagtccttttcctttgagttgtgggtatctgtaaattctgctagacctttgctggaaaacttgtaaattctgctagaccctctgtaaattccgctagacctttgtgtgttttttttgtttatattcaagtggttataatttatagaataaagaaagaataaaaaaagataaaaagaatagatcccagccctgtgtataactcactactttagtcagttccgcagtattacaaaaggatgtcgcaaacgctgtttgctcctctacaaaacagaccttaaaaccctaaaggcttaagtagcaccctcgcaagctcgggcaaatcgctgaatattccttttgtctccgaccatcaggcacctgagtcgctgtctttttcgtgacattcagttcgctgcgctcacggctctggcagtgaatgggggtaaatggcactacaggcgccttttatggattcatgcaaggaaactacccataatacaagaaaagcccgtcacgggcttctcagggcgttttatggcgggtctgctatgtggtgctatctgactttttgctgttcagcagttcctgccctctgattttccagtctgaccacttcggattatcccgtgacaggtcattcagactggctaatgcacccagtaaggcagcggtatcatcaacaggcttacccgtcttactgtcttttctacggggtctgacgctcagtggaacgaaaactcacgttaagggattttggtcatgagattatcaaaaaggatcttcacctagatccttttaaattaaaaatgaagttttaaatcaatctaaagtatatatgagtaaacttggtctgacagttaccaatgcttaatcagtgaggcacctatctcagcgatctgtctatttcgttcatccatagttgcctgactccccgtcgtgtagataactacgatacgggagggcttaccatctggccccagtgctgcaatgataccgcgagaaccacgctcaccggctccagatttatcagcaataaaccagccagccggaagggccgagcgcagaagtggtcctgcaactttatccgcctccatccagtctattaattgttgccgggaagctagagtaagtagttcgccagttaatagtttgcgcaacgttgttgccattgctacaggcatcgtggtgtcacgctcgtcgtttggtatggcttcattcagctccggttcccaacgatcaaggcgagttacatgatcccccatgttgtgcaaaaaagcggttagctccttcggtcctccgatcgttgtcagaagtaagttggccgcagtgttatcactcatggttatggcagcactgcataattctcttactgtcatgccatccgtaagatgcttttctgtgactggtgagtactcaaccaagtcattctgagaatagtgtatgcggcgaccgagttgctcttgcccggcgtcaatacgggataataccgcgccacatagcagaactttaaaagtgctcatcattggaaaacgttcttcggggcgaaaactctcaaggatcttaccgctgttgagatccagttcgatgtaacccactcgtgcacccaactgatcttcagcatcttttactttcaccagcgtttctgggtgagcaaaaacaggaaggcaaaatgccgcaaaaaagggaataagggcgacacggaaatgttgaatactcatactcttcctttttcaatattattgaagcatttatcagggttattgtctcatgagcggatacatatttgaatgtatttagaaaaataaacaaataggggttccgcgcacatttccccgaaaagtgccacctgacgtctaagaaaccattattatcatgacattaacctataaaaataggcgtatcacgaggccctttcgtctcgcgcgtttcggtgatgacggtgaaaacctctgacacatgcagctcccggagacggtcacagcttgtctgtaagcggatgccgggagcagacaagcccgtcagggcgcgtcagcgggtgttggcgggtgtcggggctggcttaactatgcggcatcagagcagattgtactgagagtgcaccatatgcggtgtgaaataccgcacagatgcgtaaggagaaaataccgcatcaggcgccattcgccattcaggctgcgcaactgttgggaagggcgatcggtgcgggcctcttcgctattacgccagctggcgaaagggggatgtgctgcaaggcgattaagttgggtaacgccagggttttcccagtcacgacgttgtaaaacgacggccagtgaattcgttaagacccactttcacatttaagttgtttttctaatccgcatatgatcaattcaaggccgaataagaaggctggctctgcaccttggtgatcaaataattcgatagcttgtcgtaataatggcggcatactatcagtagtaggtgtttccctttcttctttagcgacttgatgctcttgatcttccaatacgcaacctaaagtaaaatgccccacagcgctgagtgcatataatgcattctctagtgaaaaaccttgttggcataaaaaggctaattgattttcgagagtttcatactgtttttctgtaggccgtgtacctaaatgtacttttgctccatcgcgatgacttagtaaagcacatctaaaacttttagcgttattacgtaaaaaatcttgccagctttccccttctaaagggcaaaagtgagtatggtgcctatctaacatctcaatggctaaggcgtcgagcaaagcccgcttattttttacatgccaatacaatgtaggctgctctacacctagcttctgggcgagtttacgggttgttaaaccttcgattccgacctcattaagcagctctaatgcgctgttaatcactttacttttatctaatctagacatcattaattcctaatttttgttgacactctatcattgatagagttattttaccactccctatcagtgatagagaaaagtga

SEQ ID NO: 18 - DNA, 10134 bp, Artificial Sequence
  Description of Artificial Sequence: Synthetic polynucleotide
gagctagataataaggacggcacaagatgaacatcttcaagaaaatggaggaatttaattatgaacaactggtctacttctacgacagcgaaacggaactcaaaggtattacctgtatacacaacacaactttagggccggcattgggcggtacccgcctttggaactataactctgaggaagatgccgttgaagacgtaatccgtctggctcggggcatgacttacaaagcggcttgcgccggtctgaatctgggcggcggtaaaaccgtgctgatcggtgatgctaaaaagattaaatcagagtcctacttccgtggactggggcgctacgttcagtcgctgaacggcagatatatcaccgcggaagacgtaaatacttctacgaaggatatggcatacgttgctatggaaactgactatgtggtaggcctgggaggtaaatccggcaaccctagtccagttactgcttacggtgcatttatgggtatcaaagcggcgctgatgaaaaaatttgaggatagctctattgaaggccgaaccttcgcagtgcagggtgctgggcagacgggttactatcttatcgattacctcctaggcaacaacaagttcaaagaaaaggctaaaaagatttacttcaccgaaattaacgagagctatatcgagcgtatgaacaaagaacatccggaagttgaatttatttccccggacaaaatctactcgctggaagtagacgtcttcgtgccctgcgccctgggcaaaatcgttaatgacaaaactatcgatgaatttaagtgtccgatcatcgcaggtactgcaaacaacgtactggaaagggaagcgcacggcaacatgcttaaagaacgtggcattctttacgccccggactatgtgatcaatgctggtgggctgatcaacgtttaccacgagctgaacggttacaataaagagaacgctattctggaagtggaattaatttatgatcgcctactggaaatattcaacatcgctgattctctgaacatcagcaccaatatcgctgccaacgagttcgcggaaaaacgtatcaagcaaattaagtccttgaaaaacaacttcattaaacgctaagaccattaataaggaacattttatgtcgacgacaaccgttggtgactacttgctgtatcgcttaaacgaaatcggcattgagcacctcttcggagtgccaggtgattacaatctgcaatttctggatcatgtaatcgaccaccctcagctgacttgggtcggctgcactaacgaacttaacgctgcctacgcagctgatggttatgcgcgttgtcgtccggctgcggcactgctgaccaccttcggggttggcgaactgagcgctattaatggcatcgcaggttcctacgcggagtatctgccggtaatacatatcgttggtgcaccgagtctatcagcccagcagcagggcgacctgattcaccactctcttggcgaaggtgatttttccagcttcctgaggatgtcccaaccggtgtctgttgcgcaggctgctctgactcctgataacgcatgcaaggaaatcgaccgcgtactggcggaagtcctcattcagcgtcgtcccggctacctgctgctgtctaccgacgtggctgctgcgccggcggctctgccacaaagcactctttctttgccgaccgccccggatcatcgcgcagttctggctgctttcagcgacgctgctgagcagatgctggctcaggccaaaagcgtctctctactggcggactttctggctgatcgtttcggtgttactcgagcactggccgcgtggcttcagcaggttccgctaccgcacgccactctgttaatgggtaaaggcgttctgagtgaacagcaaccagggttcgtgggtacctacgctggtgcggcatctatcgattcgacgcgtggcgcaatcgaagaagctggggtaattatcggagtgggagttagattttccgacactatcacagcaggcttctcgcagcagatcgacgcccgccgttttatagacattcaacccttcttctctcgtattggcgatcgccagtttgatcacttgccgatgcaggctgccgtcgcagccctgcatcaactgtgtcttcgttatcagcagcagtggtctatcaccgctcctagcccgcctgcactgccgccggctgctggtagcgagctgtcccagaacgcattctggcaggcgatgcagaacttcatccgccctggggacctgttggtggccgaccaaggtactgcggcgttcggcgcagcggcgctgcgcttaccgcagaattgccagctgcttgtgcagccgctgtggggctcaatcggttacagtctgccggccacctttggtgctcagacggcagatacagagcgtcgtgtaatcctaatcattggcgatggttcagcgcaattaactattcaggaactttccagtatgatgcgtgacggcttgaaacctatcatctttctcctgaacaacaacggttacaccgttgaacgggcgattcacggcgcggagcaacgttataacgatatcgctgcttggaattggacccaactgccccaggcgctgagtgttcattgcccagcgcagagctggcgagtcgttgaaacggtgcagctgaccgacgtaatgaaagtcatcgctgcttctccgcgtctgagcttggtagaagttgttctgcctgcaatggatgtcccaccgctgctgcaagcagtgagtgccgctctgaaccagcgcaactcctcttaattggataaagaataaggaggtattttatgacagcggagcagcaaaatggggtatccgactcacgccgtttcgaatttcaggaatttggtggccctatcgccccacagacctatcagctccccgcaccggctagcgatgaagttttgttaaaggtgaactactgcggtgtctgtcacagtgatgttcatcttcacgacggctacttcgagctgggtggcgataaacgtctgaacttcgctatgccgctgccgctgacgctgggtcacgaagtaattggcaccgttgtggctgtcggcgaccaggttactggtgtaaaaccgggggaccagcgactgatctatccgtggataggttgcggaaaatgcggcgcgtgtcaaaaaggagaagaaaacctgtgcgttactcctgcacatctgggcgtgaacaagccgggcggttacgctgatcacatcgttgtaccccattctcgctaccttctggacatttcgggtctgaacccgggtgatgccgctaccctcgcgtgctccggcctgaccactttcagcgcgatcaacaaagtgttgccgcttgcagatgaccagtggattgttgttatcggttgtggtggcctcggccagatggcgctgcgtatcctgcaagctatgggaattggcaatgttatcggtattgacctgtctgaagagaaacggaaactggctcatgaaagcggtgcacgtcactccttcgatccaaacactccgaagctgaaccgcgtggtcgccgaaacctgcccgggtacggtacaggccgcgttagactttgtgggcaatgagcaaactgctcagctggcactgtctctgcttggaaaaggtggcaaatatgttcctgtcgggctgcacggcggcgagctgcgttacccattgccgatcatcacgaacaaagctgtaagtatcatcggttcttacgttggtaccctgaaagaactggaagacttagttgctttcgccaaggaaaagaatctgccgccaattcatattgaacaccgcccgctggaatcggcggctcaggccgtagaggacctggaaaaaggacaggttgctgggcgtgttatcctggatgcaggtaactaagaaggagatatacatatgacccatcaattaagatcgcgcgatatcatcgctctgggctttatgacatttgcgttgttcgtcggcgcaggtaacattattttccctccaatggtcggcttgcaggcaggcgaacacgtctggactgcggcattcggcttcctcattactgccgttggcctaccggtattaacggtagtggcgctggcaaaagttggcggcggtgttgacagtctcagcacgccaattggtaaagtcgctggcgtactgctggcaacagtttgttacctggcggtggggccgctttttgctacgccgcgtacagctaccgtttcttttgaagtgggcattgcgccgctgacgggtgattccgcgctgccgctgtttatttacagcctggtctatttcgctatcgttattctggtttcgctctatccgggcaagctgctggataccgtgggcaacttccttgcgccgctgaaaattatcgcgctggtcatcctgtctgttgccgcaattatctggccggcgggttctatcagtacggcgactgaggcttatcaaaacgctgcgttttctaacggcttcgtcaacggctatctgaccatggatacgctgggcgcaatggtgtttggtatcgttattgttaacgcggcgcgttctcgtggcgttaccgaagcgcgtctgctgacccgttataccgtctgggctggcctgatggcgggtgttggtctgactctgctgtacctggcgctgttccgtctgggttcagacagcgcgtcgctggtcgatcagtctgcaaacggtgcggcgatcctgcatgcttacgttcagcatacctttggcggcggcggtagcttcctgctggcggcgttaatcttcatcgcctgcctggtcacggcggttggcctgacctgtgcttgtgcagaattcttcgcccagtacgtaccgctctcttatcgtacgctggtgtttatcctcggcggcttctcgatggtggtgtctaacctcggcttgagccagctgattcagatctctgtaccggtgctgaccgccatttatccgccgtgtatcgcactggttgtattaagttttacacgctcatggtggcataattcgtcccgcgtgattgctccgccgatgtttatcagcctgctttttggtattctcgacgggatcaaggcatctgcattcagcgatatcttaccgtcctgggcgcagcgtttaccgctggccgaacaaggtctggcgtggttaatgccaacagtggtgatggtggttctggccattatctgggatcgtgcggcaggtcgtcaggtgacctccagcgctcactaatacgcatggcatggatgaccgatggtagtgtgggctctccccatgcgagagtagggaactgccaggcatcaaataaaacgaaaggctcagtcgaaagactgggcctttcgttttatctgttgtttgtcggtgaacgctctcctgagtaggacaaatccgccgggagcggatttgaacgttgcgaagcaacggcccggagggtggcgggcaggacgcccgccataaactgccaggcatcaaattaagcagaaggccatcctgacggatggcctttttgcgtggccagtgccaagcttgcatgcgtgccagctgcattaatgaagaaatcatgctggaagaataacagctcactcaaaggcggtagtacgggttttgctgcccgcaaacgggctgttctggtgttgctagtttgttatcagaatcgcagatccggcttcagccggtttgccggctgaaagcgctatttcttccagaattgccatgattttttccccacgggaggcgtcactggctcccgtgttgtcggcagctttgattcgataagcagcatcgcctgtttcaggctgtctatgtgtgactgttgagctgtaacaagttgtctcaggtgttcaatttcatgttctagttgctttgttttactggtttcacctgttctattaggtgttacatgctgttcatctgttacattgtcgatctgttcatggtgaacagctttgaatgcaccaaaaactcgtaaaagctctgatgtatctatcttttttacaccgttttcatctgtgcatatggacagttttccctttgatatgtaacggtgaacagttgttctacttttgtttgttagtcttgatgcttcactgatagatacaagagccataagaacctcagatccttccgtatttagccagtatgttctctagtgtggttcgttgtttttgcgtgagccatgagaacgaaccattgagatcatacttactttgcatgtcactcaaaaattttgcctcaaaactggtgagctgaatttttgcagttaaagcatcgtgtagtgtttttcttagtccgttatgtaggtaggaatctgatgtaatggttgttggtattttgtcaccattcatttttatctggttgttctcaagttcggttacgagatccatttgtctatctagttcaacttggaaaatcaacgtatcagtcgggcggcctcgcttatcaaccaccaatttcatattgctgtaagtgtttaaatctttacttattggtttcaaaacccattggttaagccttttaaactcatggtagttattttcaagcattaacatgaacttaaattcatcaaggctaatctctatatttgccttgtgagttttcttttgtgttagttcttttaataaccactcataaatcctcatagagtatttgttttcaaaagacttaacatgttccagattatattttatgaatttttttaactggaaaagataaggcaatatctcttcactaaaaactaattctaatttttcgcttgagaacttggcatagtttgtccactggaaaatctcaaagcctttaaccaaaggattcctgatttccacagttctcgtcatcagctctctggttgctttagctaatacaccataagcattttccctactgatgttcatcatctgagcgtattggttataagtgaacgataccgtccgttctttccttgtagggttttcaatcgtggggttgagtagtgccacacagcataaaattagcttggtttcatgctccgttaagtcatagcgactaatcgctagttcatttgctttgaaaacaactaattcagacatacatctcaattggtctaggtgattttaatcactataccaattgagatgggctagtcaatgataattactagtccttttcctttgagttgtgggtatctgtaaattctgctagacctttgctggaaaacttgtaaattctgctagaccctctgtaaattccgctagacctttgtgtgttttttttgtttatattcaagtggttataatttatagaataaagaaagaataaaaaaagataaaaagaatagatcccagccctgtgtataactcactactttagtcagttccgcagtattacaaaaggatgtcgcaaacgctgtttgctcctctacaaaacagaccttaaaaccctaaaggcttaagtagcaccctcgcaagctcgggcaaatcgctgaatattccttttgtctccgaccatcaggcacctgagtcgctgtctttttcgtgacattcagttcgctgcgctcacggctctggcagtgaatgggggtaaatggcactacaggcgccttttatggattcatgcaaggaaactacccataatacaagaaaagcccgtcacgggcttctcagggcgttttatggcgggtctgctatgtggtgctatctgactttttgctgttcagcagttcctgccctctgattttccagtctgaccacttcggattatcccgtgacaggtcattcagactggctaatgcacccagtaaggcagcggtatcatcaacaggcttacccgtcttactgtcttttctacggggtctgacgctcagtggaacgaaaactcacgttaagggattttggtcatgagattatcaaaaaggatcttcacctagatccttttaaattaaaaatgaagttttaaatcaatctaaagtatatatgagtaaacttggtctgacagttaccaatgcttaatcagtgaggcacctatctcagcgatctgtctatttcgttcatccatagttgcctgactccccgtcgtgtagataactacgatacgggagggcttaccatctggccccagtgctgcaatgataccgcgagaaccacgctcaccggctccagatttatcagcaataaaccagccagccggaagggccgagcgcagaagtggtcctgcaactttatccgcctccatccagtctattaattgttgccgggaagctagagtaagtagttcgccagttaatagtttgcgcaacgttgttgccattgctacaggcatcgtggtgtcacgctcgtcgtttggtatggcttcattcagctccggttcccaacgatcaaggcgagttacatgatcccccatgttgtgcaaaaaagcggttagctccttcggtcctccgatcgttgtcagaagtaagttggccgcagtgttatcactcatggttatggcagcactgcataattctcttactgtcatgccatccgtaagatgcttttctgtgactggtgagtactcaaccaagtcattctgagaatagtgtatgcggcgaccgagttgctcttgcccggcgtcaatacgggataataccgcgccacatagcagaactttaaaagtgctcatcattggaaaacgttcttcggggcgaaaactctcaaggatcttaccgctgttgagatccagttcgatgtaacccactcgtgcacccaactgatcttcagcatcttttactttcaccagcgtttctgggtgagcaaaaacaggaaggcaaaatgccgcaaaaaagggaataagggcgacacggaaatgttgaatactcatactcttcctttttcaatattattgaagcatttatcagggttattgtctcatgagcggatacatatttgaatgtatttagaaaaataaacaaataggggttccgcgcacatttccccgaaaagtgccacctgacgtctaagaaaccattattatcatgacattaacctataaaaataggcgtatcacgaggccctttcgtctcgcgcgtttcggtgatgacggtgaaaacctctgacacatgcagctcccggagacggtcacagcttgtctgtaagcggatgccgggagcagacaagcccgtcagggcgcgtcagcgggtgttggcgggtgtcggggctggcttaactatgcggcatcagagcagattgtactgagagtgcaccatatgcggtgtgaaataccgcacagatgcgtaaggagaaaataccgcatcaggcgccattcgccattcaggctgcgcaactgttgggaagggcgatcggtgcgggcctcttcgctattacgccagctggcgaaagggggatgtgctgcaaggcgattaagttgggtaacgccagggttttcccagtcacgacgttgtaaaacgacggccagtgaattcgttaagacccactttcacatttaagttgtttttctaatccgcatatgatcaattcaaggccgaataagaaggctggctctgcaccttggtgatcaaataattcgatagcttgtcgtaataatggcggcatactatcagtagtaggtgtttccctttcttctttagcgacttgatgctcttgatcttccaatacgcaacctaaagtaaaatgccccacagcgctgagtgcatataatgcattctctagtgaaaaaccttgttggcataaaaaggctaattgattttcgagagtttcatactgtttttctgtaggccgtgtacctaaatgtacttttgctccatcgcgatgacttagtaaagcacatctaaaacttttagcgttattacgtaaaaaatcttgccagctttccccttctaaagggcaaaagtgagtatggtgcctatctaacatctcaatggctaaggcgtcgagcaaagcccgcttattttttacatgccaatacaatgtaggctgctctacacctagcttctgggcgagtttacgggttgttaaaccttcgattccgacctcattaagcagctctaatgcgctgttaatcactttacttttatctaatctagacatcattaattcctaatttttgttgacactctatcattgatagagttattttaccactccctatcagtgatagagaaaagtga

SEQ ID NO: 19 - DNA, 10142 bp, Artificial Sequence
  Description of Artificial Sequence: Synthetic polynucleotide
aaacaggccaaacgtaggctccggaatttaaggaggtattattatggtagagatccaggctttgccggaaacttccatttttgggcaaatcgcagaccaccagcatgaacaggtggtcttctgccacgatcacgaaaccggcctccgtgcgataatcggtattcataacacggttcttggccccgccttaggtggaactcgcatgtggcactatgctaccgaggcagaagcgctgaatgacgttctgcgtctgtctcgcggtatgacctacaaggctgctatctcgggcctgaacctgggtggcggtaaagcagtaatcattggggatgccaaaacaatcaaaaccgaagcgctgctgcggaaattcggcagattcgtgcagaacctgaatggtaaatacatcactgctgaagacgttaacatgactacaaaggatatggagtacattaggatggaaaccaaacacgtcgctggcttacctgaaagtatgggtggaagcggtgacccgtcaccggtaactgcatatggtacgtacatgggcatgaaagcggcggccaaaaaggcgtttggctctgattccctggctggcaaacgtatcgctgttcaaggtgtgggtcatgttggcacttatctgcttgagcatttgaccaaagaaggtgctcagattgtgctgactgactactataaggaacgtgccgaggaagcaggcgcgcgttttggcgcacaggttgttggcctggacgatatctacgatcaagaggtcgacatttactctccatgtgctctcggtgctaccatcaacgatgacactatcgatcgcctgcgttgcgctgttgtagccggttgcgcaaacaaccagctgaaagaagaaaacgtccacggtccggcgctggttgagcgcgggatagtatacgccccagacttcctgatcaatgcagggggcctgattaacgtgtatagcgaagttacagggtctacccgtcagggggctttaactcagaccgaaaaaatctatgactacacactccaagttctggaaaaagccgcggctgaaggtctgcacccgcagcaggctgcgatccgtcaggcggaacaacgcatcgctgcaattggtaaggtgaaaagcacctactaatgagaaataaggaggatttcatgtcgacgacaaccgttggtgactacttgctgtatcgcttaaacgaaatcggcattgagcacctcttcggagtgccaggtgattacaatctgcaatttctggatcatgtaatcgaccaccctcagctgacttgggtcggctgcactaacgaacttaacgctgcctacgcagctgatggttatgcgcgttgtcgtccggctgcggcactgctgaccaccttcggggttggcgaactgagcgctattaatggcatcgcaggttcctacgcggagtatctgccggtaatacatatcgttggtgcaccgagtctatcagcccagcagcagggcgacctgattcaccactctcttggcgaaggtgatttttccagcttcctgaggatgtcccaaccggtgtctgttgcgcaggctgctctgactcctgataacgcatgcaaggaaatcgaccgcgtactggcggaagtcctcattcagcgtcgtcccggctacctgctgctgtctaccgacgtggctgctgcgccggcggctctgccacaaagcactctttctttgccgaccgccccggatcatcgcgcagttctggctgctttcagcgacgctgctgagcagatgctggctcaggccaaaagcgtctctctactggcggactttctggctgatcgtttcggtgttactcgagcactggccgcgtggcttcagcaggttccgctaccgcacgccactctgttaatgggtaaaggcgttctgagtgaacagcaaccagggttcgtgggtacctacgctggtgcggcatctatcgattcgacgcgtggcgcaatcgaagaagctggggtaattatcggagtgggagttagattttccgacactatcacagcaggcttctcgcagcagatcgacgcccgccgttttatagacattcaacccttcttctctcgtattggcgatcgccagtttgatcacttgccgatgcaggctgccgtcgcagccctgcatcaactgtgtcttcgttatcagcagcagtggtctatcaccgctcctagcccgcctgcactgccgccggctgctggtagcgagctgtcccagaacgcattctggcaggcgatgcagaacttcatccgccctggggacctgttggtggccgaccaaggtactgcggcgttcggcgcagcggcgctgcgcttaccgcagaattgccagctgcttgtgcagccgctgtggggctcaatcggttacagtctgccggccacctttggtgctcagacggcagatacagagcgtcgtgtaatcctaatcattggcgatggttcagcgcaattaactattcaggaactttccagtatgatgcgtgacggcttgaaacctatcatctttctcctgaacaacaacggttacaccgttgaacgggcgattcacggcgcggagcaacgttataacgatatcgctgcttggaattggacccaactgccccaggcgctgagtgttcattgcccagcgcagagctggcgagtcgttgaaacggtgcagctgaccgacgtaatgaaagtcatcgctgcttctccgcgtctgagcttggtagaagttgttctgcctgcaatggatgtcccaccgctgctgcaagcagtgagtgccgctctgaaccagcgcaactcctcttaatttttaaagtaacacacgagctaagaactaaggaggatttatgcgcagcatgcagtttgatgagtacggtgcacccctgaaagcgttctcatatgaagacccgaccccgcaagggaaggaagtagtcgttaggatcgaagcctgtggtgtgtgccactctgatattcatcttcacgagggctacttcgacatgggcggtggcaataaagctgatgttactcgtgctcgcgaactcccttttacattgggtcatgaaatcgttggcgaagtggtagcaactggaccaggtgtcaccggcgctaaaccgggcgacaaacgtattgtgtacccgtggatcgggtgcggcgactgcccgaaatgcaacagtggtgaggatcagtcctgtgcgcgtccacgtaacctgggtgttcacgttgacggtggctattcgacgcacgtaaagataccggacgaaaaattcctgttcgcctacgatggtattcctactgagttagcgggaacctatgcttgcagcggcatcaccgcttatggtgcactgatgaaagcaaaggaagcggctgaaagatctggctacatcggtctgattggcgctggtggcgttggcatggctggtctgatgctggccaaagcagcgatcggggctaaaactgtagtctttgatatcgacgacgcaaaactggaagctgcgacccgtgccggggcggattacgtgttcaactccggtgcaaaagaaacacgcaaggaagttatgaaactaacgaatggtggcctgtctggtgctgttgatttcgttggcagcgataaaagcgctctgtttggaatcaacgccttgggtcagaacggcgtgctggtcataattggactgttcggtggcgctatgactgttccggtacccctgttcccgctgaaagggatcaccgtacgtggctcatacgtaggttccctgcaagagatgagtgatatgatggagttagttcgcgctgggaaagttcctccgatgccggtaaaaactcggccactggacgctgcctgggaaacccttgaggatctacgccatggtaaaatcgtgggccgtgttgttctgaccccataagaaggagatatacatatgacccatcaattaagatcgcgcgatatcatcgctctgggctttatgacatttgcgttgttcgtcggcgcaggtaacattattttccctccaatggtcggcttgcaggcaggcgaacacgtctggactgcggcattcggcttcctcattactgccgttggcctaccggtattaacggtagtggcgctggcaaaagttggcggcggtgttgacagtctcagcacgccaattggtaaagtcgctggcgtactgctggcaacagtttgttacctggcggtggggccgctttttgctacgccgcgtacagctaccgtttcttttgaagtgggcattgcgccgctgacgggtgattccgcgctgccgctgtttatttacagcctggtctatttcgctatcgttattctggtttcgctctatccgggcaagctgctggataccgtgggcaacttccttgcgccgctgaaaattatcgcgctggtcatcctgtctgttgccgcaattatctggccggcgggttctatcagtacggcgactgaggcttatcaaaacgctgcgttttctaacggcttcgtcaacggctatctgaccatggatacgctgggcgcaatggtgtttggtatcgttattgttaacgcggcgcgttctcgtggcgttaccgaagcgcgtctgctgacccgttataccgtctgggctggcctgatggcgggtgttggtctgactctgctgtacctggcgctgttccgtctgggttcagacagcgcgtcgctggtcgatcagtctgcaaacggtgcggcgatcctgcatgcttacgttcagcatacctttggcggcggcggtagcttcctgctggcggcgttaatcttcatcgcctgcctggtcacggcggttggcctgacctgtgcttgtgcagaattcttcgcccagtacgtaccgctctcttatcgtacgctggtgtttatcctcggcggcttctcgatggtggtgtctaacctcggcttgagccagctgattcagatctctgtaccggtgctgaccgccatttatccgccgtgtatcgcactggttgtattaagttttacacgctcatggtggcataattcgtcccgcgtgattgctccgccgatgtttatcagcctgctttttggtattctcgacgggatcaaggcatctgcattcagcgatatcttaccgtcctgggcgcagcgtttaccgctggccgaacaaggtctggcgtggttaatgccaacagtggtgatggtggttctggccattatctgggatcgtgcggcaggtcgtcaggtgacctccagcgctcactaatacgcatggcatggatgaccgatggtagtgtgggctctccccatgcgagagtagggaactgccaggcatcaaataaaacgaaaggctcagtcgaaagactgggcctttcgttttatctgttgtttgtcggtgaacgctctcctgagtaggacaaatccgccgggagcggatttgaacgttgcgaagcaacggcccggagggtggcgggcaggacgcccgccataaactgccaggcatcaaattaagcagaaggccatcctgacggatggcctttttgcgtggccagtgccaagcttgcatgcgtgccagctgcattaatgaagaaatcatgctggaagaataacagctcactcaaaggcggtagtacgggttttgctgcccgcaaacgggctgttctggtgttgctagtttgttatcagaatcgcagatccggcttcagccggtttgccggctgaaagcgctatttcttccagaattgccatgattttttccccacgggaggcgtcactggctcccgtgttgtcggcagctttgattcgataagcagcatcgcctgtttcaggctgtctatgtgtgactgttgagctgtaacaagttgtctcaggtgttcaatttcatgttctagttgctttgttttactggtttcacctgttctattaggtgttacatgctgttcatctgttacattgtcgatctgttcatggtgaacagctttgaatgcaccaaaaactcgtaaaagctctgatgtatctatcttttttacaccgttttcatctgtgcatatggacagttttccctttgatatgtaacggtgaacagttgttctacttttgtttgttagtcttgatgcttcactgatagatacaagagccataagaacctcagatccttccgtatttagccagtatgttctctagtgtggttcgttgtttttgcgtgagccatgagaacgaaccattgagatcatacttactttgcatgtcactcaaaaattttgcctcaaaactggtgagctgaatttttgcagttaaagcatcgtgtagtgtttttcttagtccgttatgtaggtaggaatctgatgtaatggttgttggtattttgtcaccattcatttttatctggttgttctcaagttcggttacgagatccatttgtctatctagttcaacttggaaaatcaacgtatcagtcgggcggcctcgcttatcaaccaccaatttcatattgctgtaagtgtttaaatctttacttattggtttcaaaacccattggttaagccttttaaactcatggtagttattttcaagcattaacatgaacttaaattcatcaaggctaatctctatatttgccttgtgagttttcttttgtgttagttcttttaataaccactcataaatcctcatagagtatttgttttcaaaagacttaacatgttccagattatattttatgaatttttttaactggaaaagataaggcaatatctcttcactaaaaactaattctaatttttcgcttgagaacttggcatagtttgtccactggaaaatctcaaagcctttaaccaaaggattcctgatttccacagttctcgtcatcagctctctggttgctttagctaatacaccataagcattttccctactgatgttcatcatctgagcgtattggttataagtgaacgataccgtccgttctttccttgtagggttttcaatcgtggggttgagtagtgccacacagcataaaattagcttggtttcatgctccgttaagtcatagcgactaatcgctagttcatttgctttgaaaacaactaattcagacatacatctcaattggtctaggtgattttaatcactataccaattgagatgggctagtcaatgataattactagtccttttcctttgagttgtgggtatctgtaaattctgctagacctttgctggaaaacttgtaaattctgctagaccctctgtaaattccgctagacctttgtgtgttttttttgtttatattcaagtggttataatttatagaataaagaaagaataaaaaaagataaaaagaatagatcccagccctgtgtataactcactactttagtcagttccgcagtattacaaaaggatgtcgcaaacgctgtttgctcctctacaaaacagaccttaaaaccctaaaggcttaagtagcaccctcgcaagctcgggcaaatcgctgaatattccttttgtctccgaccatcaggcacctgagtcgctgtctttttcgtgacattcagttcgctgcgctcacggctctggcagtgaatgggggtaaatggcactacaggcgccttttatggattcatgcaaggaaactacccataatacaagaaaagcccgtcacgggcttctcagggcgttttatggcgggtctgctatgtggtgctatctgactttttgctgttcagcagttcctgccctctgattttccagtctgaccacttcggattatcccgtgacaggtcattcagactggctaatgcacccagtaaggcagcggtatcatcaacaggcttacccgtcttactgtcttttctacggggtctgacgctcagtggaacgaaaactcacgttaagggattttggtcatgagattatcaaaaaggatcttcacctagatccttttaaattaaaaatgaagttttaaatcaatctaaagtatatatgagtaaacttggtctgacagttaccaatgcttaatcagtgaggcacctatctcagcgatctgtctatttcgttcatccatagttgcctgactccccgtcgtgtagataactacgatacgggagggcttaccatctggccccagtgctgcaatgataccgcgagaaccacgctcaccggctccagatttatcagcaataaaccagccagccggaagggccgagcgcagaagtggtcctgcaactttatccgcctccatccagtctattaattgttgccgggaagctagagtaagtagttcgccagttaatagtttgcgcaacgttgttgccattgctacaggcatcgtggtgtcacgctcgtcgtttggtatggcttcattcagctccggttcccaacgatcaaggcgagttacatgatcccccatgttgtgcaaaaaagcggttagctccttcggtcctccgatcgttgtcagaagtaagttggccgcagtgttatcactcatggttatggcagcactgcataattctcttactgtcatgccatccgtaagatgcttttctgtgactggtgagtactcaaccaagtcattctgagaatagtgtatgcggcgaccgagttgctcttgcccggcgtcaatacgggataataccgcgccacatagcagaactttaaaagtgctcatcattggaaaacgttcttcggggcgaaaactctcaaggatcttaccgctgttgagatccagttcgatgtaacccactcgtgcacccaactgatcttcagcatcttttactttcaccagcgtttctgggtgagcaaaaacaggaaggcaaaatgccgcaaaaaagggaataagggcgacacggaaatgttgaatactcatactcttcctttttcaatattattgaagcatttatcagggttattgtctcatgagcggatacatatttgaatgtatttagaaaaataaacaaataggggttccgcgcacatttccccgaaaagtgccacctgacgtctaagaaaccattattatcatgacattaacctataaaaataggcgtatcacgaggccctttcgtctcgcgcgtttcggtgatgacggtgaaaacctctgacacatgcagctcccggagacggtcacagcttgtctgtaagcggatgccgggagcagacaagcccgtcagggcgcgtcagcgggtgttggcgggtgtcggggctggcttaactatgcggcatcagagcagattgtactgagagtgcaccatatgcggtgtgaaataccgcacagatgcgtaaggagaaaataccgcatcaggcgccattcgccattcaggctgcgcaactgttgggaagggcgatcggtgcgggcctcttcgctattacgccagctggcgaaagggggatgtgctgcaaggcgattaagttgggtaacgccagggttttcccagtcacgacgttgtaaaacgacggccagtgaattcgttaagacccactttcacatttaagttgtttttctaatccgcatatgatcaattcaaggccgaataagaaggctggctctgcaccttggtgatcaaataattcgatagcttgtcgtaataatggcggcatactatcagtagtaggtgtttccctttcttctttagcgacttgatgctcttgatcttccaatacgcaacctaaagtaaaatgccccacagcgctgagtgcatataatgcattctctagtgaaaaaccttgttggcataaaaaggctaattgattttcgagagtttcatactgtttttctgtaggccgtgtacctaaatgtacttttgctccatcgcgatgacttagtaaagcacatctaaaacttttagcgttattacgtaaaaaatcttgccagctttccccttctaaagggcaaaagtgagtatggtgcctatctaacatctcaatggctaaggcgtcgagcaaagcccgcttattttttacatgccaatacaatgtaggctgctctacacctagcttctgggcgagtttacgggttgttaaaccttcgattccgacctcattaagcagctctaatgcgctgttaatcactttacttttatctaatctagacatcattaattcctaatttttgttgacactctatcattgatagagttattttaccactccctatcagtgatagagaaaagtga

SEQ ID NO: 20 - DNA, 10158 bp, Artificial Sequence
  Description of Artificial Sequence: Synthetic polynucleotide
aaacaggccaaacgtaggctccggaatttaaggaggtattattatggtagagatccaggctttgccggaaacttccatttttgggcaaatcgcagaccaccagcatgaacaggtggtcttctgccacgatcacgaaaccggcctccgtgcgataatcggtattcataacacggttcttggccccgccttaggtggaactcgcatgtggcactatgctaccgaggcagaagcgctgaatgacgttctgcgtctgtctcgcggtatgacctacaaggctgctatctcgggcctgaacctgggtggcggtaaagcagtaatcattggggatgccaaaacaatcaaaaccgaagcgctgctgcggaaattcggcagattcgtgcagaacctgaatggtaaatacatcactgctgaagacgttaacatgactacaaaggatatggagtacattaggatggaaaccaaacacgtcgctggcttacctgaaagtatgggtggaagcggtgacccgtcaccggtaactgcatatggtacgtacatgggcatgaaagcggcggccaaaaaggcgtttggctctgattccctggctggcaaacgtatcgctgttcaaggtgtgggtcatgttggcacttatctgcttgagcatttgaccaaagaaggtgctcagattgtgctgactgactactataaggaacgtgccgaggaagcaggcgcgcgttttggcgcacaggttgttggcctggacgatatctacgatcaagaggtcgacatttactctccatgtgctctcggtgctaccatcaacgatgacactatcgatcgcctgcgttgcgctgttgtagccggttgcgcaaacaaccagctgaaagaagaaaacgtccacggtccggcgctggttgagcgcgggatagtatacgccccagacttcctgatcaatgcagggggcctgattaacgtgtatagcgaagttacagggtctacccgtcagggggctttaactcagaccgaaaaaatctatgactacacactccaagttctggaaaaagccgcggctgaaggtctgcacccgcagcaggctgcgatccgtcaggcggaacaacgcatcgctgcaattggtaaggtgaaaagcacctactaatgagaaataaggaggatttcatgtcgacgacaaccgttggtgactacttgctgtatcgcttaaacgaaatcggcattgagcacctcttcggagtgccaggtgattacaatctgcaatttctggatcatgtaatcgaccaccctcagctgacttgggtcggctgcactaacgaacttaacgctgcctacgcagctgatggttatgcgcgttgtcgtccggctgcggcactgctgaccaccttcggggttggcgaactgagcgctattaatggcatcgcaggttcctacgcggagtatctgccggtaatacatatcgttggtgcaccgagtctatcagcccagcagcagggcgacctgattcaccactctcttggcgaaggtgatttttccagcttcctgaggatgtcccaaccggtgtctgttgcgcaggctgctctgactcctgataacgcatgcaaggaaatcgaccgcgtactggcggaagtcctcattcagcgtcgtcccggctacctgctgctgtctaccgacgtggctgctgcgccggcggctctgccacaaagcactctttctttgccgaccgccccggatcatcgcgcagttctggctgctttcagcgacgctgctgagcagatgctggctcaggccaaaagcgtctctctactggcggactttctggctgatcgtttcggtgttactcgagcactggccgcgtggcttcagcaggttccgctaccgcacgccactctgttaatgggtaaaggcgttctgagtgaacagcaaccagggttcgtgggtacctacgctggtgcggcatctatcgattcgacgcgtggcgcaatcgaagaagctggggtaattatcggagtgggagttagattttccgacactatcacagcaggcttctcgcagcagatcgacgcccgccgttttatagacattcaacccttcttctctcgtattggcgatcgccagtttgatcacttgccgatgcaggctgccgtcgcagccctgcatcaactgtgtcttcgttatcagcagcagtggtctatcaccgctcctagcccgcctgcactgccgccggctgctggtagcgagctgtcccagaacgcattctggcaggcgatgcagaacttcatccgccctggggacctgttggtggccgaccaaggtactgcggcgttcggcgcagcggcgctgcgcttaccgcagaattgccagctgcttgtgcagccgctgtggggctcaatcggttacagtctgccggccacctttggtgctcagacggcagatacagagcgtcgtgtaatcctaatcattggcgatggttcagcgcaattaactattcaggaactttccagtatgatgcgtgacggcttgaaacctatcatctttctcctgaacaacaacggttacaccgttgaacgggcgattcacggcgcggagcaacgttataacgatatcgctgcttggaattggacccaactgccccaggcgctgagtgttcattgcccagcgcagagctggcgagtcgttgaaacggtgcagctgaccgacgtaatgaaagtcatcgctgcttctccgcgtctgagcttggtagaagttgttctgcctgcaatggatgtcccaccgctgctgcaagcagtgagtgccgctctgaaccagcgcaactcctcttaattggataaagaataaggaggtattttatgacagcggagcagcaaaatggggtatccgactcacgccgtttcgaatttcaggaatttggtggccctatcgccccacagacctatcagctccccgcaccggctagcgatgaagttttgttaaaggtgaactactgcggtgtctgtcacagtgatgttcatcttcacgacggctacttcgagctgggtggcgataaacgtctgaacttcgctatgccgctgccgctgacgctgggtcacgaagtaattggcaccgttgtggctgtcggcgaccaggttactggtgtaaaaccgggggaccagcgactgatctatccgtggataggttgcggaaaatgcggcgcgtgtcaaaaaggagaagaaaacctgtgcgttactcctgcacatctgggcgtgaacaagccgggcggttacgctgatcacatcgttgtaccccattctcgctaccttctggacatttcgggtctgaacccgggtgatgccgctaccctcgcgtgctccggcctgaccactttcagcgcgatcaacaaagtgttgccgcttgcagatgaccagtggattgttgttatcggttgtggtggcctcggccagatggcgctgcgtatcctgcaagctatgggaattggcaatgttatcggtattgacctgtctgaagagaaacggaaactggctcatgaaagcggtgcacgtcactccttcgatccaaacactccgaagctgaaccgcgtggtcgccgaaacctgcccgggtacggtacaggccgcgttagactttgtgggcaatgagcaaactgctcagctggcactgtctctgcttggaaaaggtggcaaatatgttcctgtcgggctgcacggcggcgagctgcgttacccattgccgatcatcacgaacaaagctgtaagtatcatcggttcttacgttggtaccctgaaagaactggaagacttagttgctttcgccaaggaaaagaatctgccgccaattcatattgaacaccgcccgctggaatcggcggctcaggccgtagaggacctggaaaaaggacaggttgctgggcgtgttatcctggatgcaggtaactaagaaggagatatacatatgacccatcaattaagatcgcgcgatatcatcgctctgggctttatgacatttgcgttgttcgtcggcgcaggtaacattattttccctccaatggtcggcttgcaggcaggcgaacacgtctggactgcggcattcggcttcctcattactgccgttggcctaccggtattaacggtagtggcgctggcaaaagttggcggcggtgttgacagtctcagcacgccaattggtaaagtcgctggcgtactgctggcaacagtttgttacctggcggtggggccgctttttgctacgccgcgtacagctaccgtttcttttgaagtgggcattgcgccgctgacgggtgattccgcgctgccgctgtttatttacagcctggtctatttcgctatcgttattctggtttcgctctatccgggcaagctgctggataccgtgggcaacttccttgcgccgctgaaaattatcgcgctggtcatcctgtctgttgccgcaattatctggccggcgggttctatcagtacggcgactgaggcttatcaaaacgctgcgttttctaacggcttcgtcaacggctatctgaccatggatacgctgggcgcaatggtgtttggtatcgttattgttaacgcggcgcgttctcgtggcgttaccgaagcgcgtctgctgacccgttataccgtctgggctggcctgatggcgggtgttggtctgactctgctgtacctggcgctgttccgtctgggttcagacagcgcgtcgctggtcgatcagtctgcaaacggtgcggcgatcctgcatgcttacgttcagcatacctttggcggcggcggtagcttcctgctggcggcgttaatcttcatcgcctgcctggtcacggcggttggcctgacctgtgcttgtgcagaattcttcgcccagtacgtaccgctctcttatcgtacgctggtgtttatcctcggcggcttctcgatggtggtgtctaacctcggcttgagccagctgattcagatctctgtaccggtgctgaccgccatttatccgccgtgtatcgcactggttgtattaagttttacacgctcatggtggcataattcgtcccgcgtgattgctccgccgatgtttatcagcctgctttttggtattctcgacgggatcaaggcatctgcattcagcgatatcttaccgtcctgggcgcagcgtttaccgctggccgaacaaggtctggcgtggttaatgccaacagtggtgatggtggttctggccattatctgggatcgtgcggcaggtcgtcaggtgacctccagcgctcactaatacgcatggcatggatgaccgatggtagtgtgggctctccccatgcgagagtagggaactgccaggcatcaaataaaacgaaaggctcagtcgaaagactgggcctttcgttttatctgttgtttgtcggtgaacgctctcctgagtaggacaaatccgccgggagcggatttgaacgttgcgaagcaacggcccggagggtggcgggcaggacgcccgccataaactgccaggcatcaaattaagcagaaggccatcctgacggatggcctttttgcgtggccagtgccaagcttgcatgcgtgccagctgcattaatgaagaaatcatgctggaagaataacagctcactcaaaggcggtagtacgggttttgctgcccgcaaacgggctgttctggtgttgctagtttgttatcagaatcgcagatccggcttcagccggtttgccggctgaaagcgctatttcttccagaattgccatgattttttccccacgggaggcgtcactggctcccgtgttgtcggcagctttgattcgataagcagcatcgcctgtttcaggctgtctatgtgtgactgttgagctgtaacaagttgtctcaggtgttcaatttcatgttctagttgctttgttttactggtttcacctgttctattaggtgttacatgctgttcatctgttacattgtcgatctgttcatggtgaacagctttgaatgcaccaaaaactcgtaaaagctctgatgtatctatcttttttacaccgttttcatctgtgcatatggacagttttccctttgatatgtaacggtgaacagttgttctacttttgtttgttagtcttgatgcttcactgatagatacaagagccataagaacctcagatccttccgtatttagccagtatgttctctagtgtggttcgttgtttttgcgtgagccatgagaacgaaccattgagatcatacttactttgcatgtcactcaaaaattttgcctcaaaactggtgagctgaatttttgcagttaaagcatcgtgtagtgtttttcttagtccgttatgtaggtaggaatctgatgtaatggttgttggtattttgtcaccattcatttttatctggttgttctcaagttcggttacgagatccatttgtctatctagttcaacttggaaaatcaacgtatcagtcgggcggcctcgcttatcaaccaccaatttcatattgctgtaagtgtttaaatctttacttattggtttcaaaacccattggttaagccttttaaactcatggtagttattttcaagcattaacatgaacttaaattcatcaaggctaatctctatatttgccttgtgagttttcttttgtgttagttcttttaataaccactcataaatcctcatagagtatttgttttcaaaagacttaacatgttccagattatattttatgaatttttttaactggaaaagataaggcaatatctcttcactaaaaactaattctaatttttcgcttgagaacttggcatagtttgtccactggaaaatctcaaagcctttaaccaaaggattcctgatttccacagttctcgtcatcagctctctggttgctttagctaatacaccataagcattttccctactgatgttcatcatctgagcgtattggttataagtgaacgataccgtccgttctttccttgtagggttttcaatcgtggggttgagtagtgccacacagcataaaattagcttggtttcatgctccgttaagtcatagcgactaatcgctagttcatttgctttgaaaacaactaattcagacatacatctcaattggtctaggtgattttaatcactataccaattgagatgggctagtcaatgataattactagtccttttcctttgagttgtgggtatctgtaaattctgctagacctttgctggaaaacttgtaaattctgctagaccctctgtaaattccgctagacctttgtgtgttttttttgtttatattcaagtggttataatttatagaataaagaaagaataaaaaaagataaaaagaatagatcccagccctgtgtataactcactactttagtcagttccgcagtattacaaaaggatgtcgcaaacgctgtttgctcctctacaaaacagaccttaaaaccctaaaggcttaagtagcaccctcgcaagctcgggcaaatcgctgaatattccttttgtctccgaccatcaggcacctgagtcgctgtctttttcgtgacattcagttcgctgcgctcacggctctggcagtgaatgggggtaaatggcactacaggcgccttttatggattcatgcaaggaaactacccataatacaagaaaagcccgtcacgggcttctcagggcgttttatggcgggtctgctatgtggtgctatctgactttttgctgttcagcagttcctgccctctgattttccagtctgaccacttcggattatcccgtgacaggtcattcagactggctaatgcacccagtaaggcagcggtatcatcaacaggcttacccgtcttactgtcttttctacggggtctgacgctcagtggaacgaaaactcacgttaagggattttggtcatgagattatcaaaaaggatcttcacctagatccttttaaattaaaaatgaagttttaaatcaatctaaagtatatatgagtaaacttggtctgacagttaccaatgcttaatcagtgaggcacctatctcagcgatctgtctatttcgttcatccatagttgcctgactccccgtcgtgtagataactacgatacgggagggcttaccatctggccccagtgctgcaatgataccgcgagaaccacgctcaccggctccagatttatcagcaataaaccagccagccggaagggccgagcgcagaagtggtcctgcaactttatccgcctccatccagtctattaattgttgccgggaagctagagtaagtagttcgccagttaatagtttgcgcaacgttgttgccattgctacaggcatcgtggtgtcacgctcgtcgtttggtatggcttcattcagctccggttcccaacgatcaaggcgagttacatgatcccccatgttgtgcaaaaaagcggttagctccttcggtcctccgatcgttgtcagaagtaagttggccgcagtgttatcactcatggttatggcagcactgcataattctcttactgtcatgccatccgtaagatgcttttctgtgactggtgagtactcaaccaagtcattctgagaatagtgtatgcggcgaccgagttgctcttgcccggcgtcaatacgggataataccgcgccacatagcagaactttaaaagtgctcatcattggaaaacgttcttcggggcgaaaactctcaaggatcttaccgctgttgagatccagttcgatgtaacccactcgtgcacccaactgatcttcagcatcttttactttcaccagcgtttctgggtgagcaaaaacaggaaggcaaaatgccgcaaaaaagggaataagggcgacacggaaatgttgaatactcatactcttcctttttcaatattattgaagcatttatcagggttattgtctcatgagcggatacatatttgaatgtatttagaaaaataaacaaataggggttccgcgcacatttccccgaaaagtgccacctgacgtctaagaaaccattattatcatgacattaacctataaaaataggcgtatcacgaggccctttcgtctcgcgcgtttcggtgatgacggtgaaaacctctgacacatgcagctcccggagacggtcacagcttgtctgtaagcggatgccgggagcagacaagcccgtcagggcgcgtcagcgggtgttggcgggtgtcggggctggcttaactatgcggcatcagagcagattgtactgagagtgcaccatatgcggtgtgaaataccgcacagatgcgtaaggagaaaataccgcatcaggcgccattcgccattcaggctgcgcaactgttgggaagggcgatcggtgcgggcctcttcgctattacgccagctggcgaaagggggatgtgctgcaaggcgattaagttgggtaacgccagggttttcccagtcacgacgttgtaaaacgacggccagtgaattcgttaagacccactttcacatttaagttgtttttctaatccgcatatgatcaattcaaggccgaataagaaggctggctctgcaccttggtgatcaaataattcgatagcttgtcgtaataatggcggcatactatcagtagtaggtgtttccctttcttctttagcgacttgatgctcttgatcttccaatacgcaacctaaagtaaaatgccccacagcgctgagtgcatataatgcattctctagtgaaaaaccttgttggcataaaaaggctaattgattttcgagagtttcatactgtttttctgtaggccgtgtacctaaatgtacttttgctccatcgcgatgacttagtaaagcacatctaaaacttttagcgttattacgtaaaaaatcttgccagctttccccttctaaagggcaaaagtgagtatggtgcctatctaacatctcaatggctaaggcgtcgagcaaagcccgcttattttttacatgccaatacaatgtaggctgctctacacctagcttctgggcgagtttacgggttgttaaaccttcgattccgacctcattaagcagctctaatgcgctgttaatcactttacttttatctaatctagacatcattaattcctaatttttgttgacactctatcattgatagagttattttaccactccctatcagtgatagagaaaagtga

SEQ ID NO: 21 - DNA, 10101 bp, Artificial Sequence
  Description of Artificial Sequence: Synthetic polynucleotide
actacagtatataaggagggtaatatgatcttcgagacaatttctacgtcgaatcacgaagaagttgtgtattgccataacaaggacgccggcttgaaagcaatcatcgcgattcacaacactgtactcggtccggctctgggtggcactcgcatgtggccctacgctagcgaagaggaagcactgaaagatgtccttcgtttatcccgtgggatgacctacaaagctgcggtttcaggtctaaacctgggcggcggtaaagctgtgatctggggtgatccgaataaagacaagtctgaagcgctgtttagagccttcggacggtttgtaaacagcctgggcggacgctacattaccgcggaggacgttggcattgatgttaacgacatggaatatgtgctgcgtgaaactgattacgtcaccggtgtacatcaggttcacggtgggagtggtgatccttctccattcaccgcatatggcactctgcaaggcctgatggccgctctgcaagtgaaattcggtaacgaagacgtaggcaattacagctacgctgttcagggtgtgggtcacgttggcatggaatttgttaaactgctgcgtgagcgcggtgcaaaggttttcgtcactgacatcaacaaagatgcggtccagcgtgctgtggacgaatttggttgtgaggcagtagccctggatgaaatctatgacgttgattgcgacgtgtactccccgaccgctctgggcggcaccgtgaacgataaaactttaccgcgtctgaaatgtaaggtaatctgcggtgcggcaaacaaccagttagctaatgatgagataggcgtggaactggaaaagaaaggcatcctctatgctccggactacgcggtcaacgcgggtgggctgatgaacgttagcctggaaatcgatggatacaaccgcgaacgtgcgatgcgtatgatgcgtaccatttattacaatttgggtcgcattttcgaaatctctaagcgcgacggcatccctacattccgagccgccgatcgtatggctgaagaacgcataacggccatcggtaaactgcgtttaccgcatttgggcgctgcggcaccgcgcttccagggccgacgtggcaactaacagaaatagtaaaggaggtttttaatgtcggagatcacattgggtagataccttttcgaacgcttaaaccaactgcaagtgcagactatttttgggctgcccggcgacttcaatctgtccctgctggataagatctatgaagttgatggcatgcgttgggcaggtaacgctaacgaactcaacgccgcttacgcggctgacggttatagccgtgtcaaaggcctcgcatgtctggttaccacttttggtgtaggcgagctaagtgcgctgaatggtgtgggtggcgcttacgcagaacacgttgggctgctgcatgtagtgggcgtcccatcaatctctagccaggcgaaacagctgctgctgcaccataccctgggtaacggagatttcacggttttccaccgcatgtccaacaacatttctcagaccacggcttttatcagcgacattaattctgctcctggtgaaatcgataggtgcatccgtgaggcctgggtacatcagcgtccggtttacgtcggcctgccggcgaacctagttgacctgactgtgccggcgtctctgttagacactccgatcgatctgtccttgaaaaagaacgacccggatgcccaggaagaagttattgaaaccgtccttgatctggtagacaagtctaaaaaccctataatcttagttgacgcatgcgctagccgtcactcatgccgcgatgaagtacgccggttggtggactccaccagcttcccggttttcgttactccaatgggtaaatctgctgtaaatgagagtcacccgcgttttggcggtgtttacgtgggcagcctcagcgagccaaacgtaaaagaagccgttgaaaacgctgacctggtgctgtccataggcgccctgttgagcgacttcaacactggatcgttctcttattcctacaaaactaagaacattgttgaatttcactctgattataccaaaatccgtcaagcaacgttcccgggtgttcagatgaaagaagcactgaatgtcctgttggaaaaaatcccgagccatgtcgctaactacaaacctctgccggttccgcagcgtcgcgttattccgagcccaggggataaggctgcgatctctcaggagtggctgtggtcgcgtctgtctagctggttccgcgagggcgacatcgtcattacagaaaccggtaccagtgcgtttggaattgtacagtcctatttcccagataactgcatcggcatcagtcaggtgctgtggggttcgatcggcttcaccgtaggtgcaacgctgggcgcggtgatggctgcacaagaaatcgatccgaaaaaacgtgtgattttatttgtcggtgacggttctctgcaacttactgtacaggaaatttctaccatggttaagtgggaaaccactccctacctgtttgtgctgaacaacgatgggtacactatcgaacgccttatccatggcgagactgctacgtataacgatattcagccgtgggataatctgggtctgttgccgctgttcaaagctcgtgactacgaaaccaaccgagttgcgactgtaggcgaaattgaagcgctattcaacaattcagctttcaatgagaatacaaagatccgtatggtggaggtcatgctgccgcggatggatgcaccacagaacctggttaaacaggctgaattttcctccaagaccaacagcgaaaactaaacaaggcacggaaaaattggaggagaaagatgcagacggcgttcttgtataagccaggtcacgaaaacttagtgcgctcggagatcccgatacctaaagctgggcgtggcgaagtcgttctggaaattaaagccgctggcatgtgccattccgatctgcacgttctcgacggtggaatccccctgccgggtcaatttgtaatgggccatgaaatcgttggtactattcacgagatcggccaggacgtgaccggtttcaaacagggcgatctgtacgcagtccacggcccgaatccgtgtggtatttgcaccctgtgcagagaaggatttgataacgactgcactacagtggcgaaaaccggtcaatggttcggactgggtcttgacggcggctaccagaagtatatccgtatcccgaacgtaaggtctatcgttaaagttccagaaggtgtttcagctgaggcagctgcgagctgtactgatgcagtactgaccccgtaccgtgcactaaaacaggctggcgccagcaactctactcgggtactgattctgggtctgggtggcttaggtctgaatgcccttaaactggctaagaccttcggcagttacgtttacgcatctgacctgaaaccttctgcgcgtgaagctgctaaggccgctggggcggatgaagtgctggagtccctgcccgaagacccgctgggtgttgatatcgtgttagacgtcgttggcgtgcagagcaccttcaacctcgctcaaaaacacgttggcccgcgtggcatcattgtacctgtaggcctggcatccccacagctttcgtttaacctaacggatctggcgctccgcgaaattcgtgttcagggcactttttggggcacgagcaatgagctggctgaatgtctgcgcctgtgccagctgggcctgatcaacccgaaatatactgtggtgcctcttgaagaagcgccgaaatatatggaagcaatggctcatgggaaagtagaaggtcgtatcgttttccacccgtaagaaggagatatacatatgacccatcaattaagatcgcgcgatatcatcgctctgggctttatgacatttgcgttgttcgtcggcgcaggtaacattattttccctccaatggtcggcttgcaggcaggcgaacacgtctggactgcggcattcggcttcctcattactgccgttggcctaccggtattaacggtagtggcgctggcaaaagttggcggcggtgttgacagtctcagcacgccaattggtaaagtcgctggcgtactgctggcaacagtttgttacctggcggtggggccgctttttgctacgccgcgtacagctaccgtttcttttgaagtgggcattgcgccgctgacgggtgattccgcgctgccgctgtttatttacagcctggtctatttcgctatcgttattctggtttcgctctatccgggcaagctgctggataccgtgggcaacttccttgcgccgctgaaaattatcgcgctggtcatcctgtctgttgccgcaattatctggccggcgggttctatcagtacggcgactgaggcttatcaaaacgctgcgttttctaacggcttcgtcaacggctatctgaccatggatacgctgggcgcaatggtgtttggtatcgttattgttaacgcggcgcgttctcgtggcgttaccgaagcgcgtctgctgacccgttataccgtctgggctggcctgatggcgggtgttggtctgactctgctgtacctggcgctgttccgtctgggttcagacagcgcgtcgctggtcgatcagtctgcaaacggtgcggcgatcctgcatgcttacgttcagcatacctttggcggcggcggtagcttcctgctggcggcgttaatcttcatcgcctgcctggtcacggcggttggcctgacctgtgcttgtgcagaattcttcgcccagtacgtaccgctctcttatcgtacgctggtgtttatcctcggcggcttctcgatggtggtgtctaacctcggcttgagccagctgattcagatctctgtaccggtgctgaccgccatttatccgccgtgtatcgcactggttgtattaagttttacacgctcatggtggcataattcgtcccgcgtgattgctccgccgatgtttatcagcctgctttttggtattctcgacgggatcaaggcatctgcattcagcgatatcttaccgtcctgggcgcagcgtttaccgctggccgaacaaggtctggcgtggttaatgccaacagtggtgatggtggttctggccattatctgggatcgtgcggcaggtcgtcaggtgacctccagcgctcactaatacgcatggcatggatgaccgatggtagtgtgggctctccccatgcgagagtagggaactgccaggcatcaaataaaacgaaaggctcagtcgaaagactgggcctttcgttttatctgttgtttgtcggtgaacgctctcctgagtaggacaaatccgccgggagcggatttgaacgttgcgaagcaacggcccggagggtggcgggcaggacgcccgccataaactgccaggcatcaaattaagcagaaggccatcctgacggatggcctttttgcgtggccagtgccaagcttgcatgcgtgccagctgcattaatgaagaaatcatgctggaagaataacagctcactcaaaggcggtagtacgggttttgctgcccgcaaacgggctgttctggtgttgctagtttgttatcagaatcgcagatccggcttcagccggtttgccggctgaaagcgctatttcttccagaattgccatgattttttccccacgggaggcgtcactggctcccgtgttgtcggcagctttgattcgataagcagcatcgcctgtttcaggctgtctatgtgtgactgttgagctgtaacaagttgtctcaggtgttcaatttcatgttctagttgctttgttttactggtttcacctgttctattaggtgttacatgctgttcatctgttacattgtcgatctgttcatggtgaacagctttgaatgcaccaaaaactcgtaaaagctctgatgtatctatcttttttacaccgttttcatctgtgcatatggacagttttccctttgatatgtaacggtgaacagttgttctacttttgtttgttagtcttgatgcttcactgatagatacaagagccataagaacctcagatccttccgtatttagccagtatgttctctagtgtggttcgttgtttttgcgtgagccatgagaacgaaccattgagatcatacttactttgcatgtcactcaaaaattttgcctcaaaactggtgagctgaatttttgcagttaaagcatcgtgtagtgtttttcttagtccgttatgtaggtaggaatctgatgtaatggttgttggtattttgtcaccattcatttttatctggttgttctcaagttcggttacgagatccatttgtctatctagttcaacttggaaaatcaacgtatcagtcgggcggcctcgcttatcaaccaccaatttcatattgctgtaagtgtttaaatctttacttattggtttcaaaacccattggttaagccttttaaactcatggtagttattttcaagcattaacatgaacttaaattcatcaaggctaatctctatatttgccttgtgagttttcttttgtgttagttcttttaataaccactcataaatcctcatagagtatttgttttcaaaagacttaacatgttccagattatattttatgaatttttttaactggaaaagataaggcaatatctcttcactaaaaactaattctaatttttcgcttgagaacttggcatagtttgtccactggaaaatctcaaagcctttaaccaaaggattcctgatttccacagttctcgtcatcagctctctggttgctttagctaatacaccataagcattttccctactgatgttcatcatctgagcgtattggttataagtgaacgataccgtccgttctttccttgtagggttttcaatcgtggggttgagtagtgccacacagcataaaattagcttggtttcatgctccgttaagtcatagcgactaatcgctagttcatttgctttgaaaacaactaattcagacatacatctcaattggtctaggtgattttaatcactataccaattgagatgggctagtcaatgataattactagtccttttcctttgagttgtgggtatctgtaaattctgctagacctttgctggaaaacttgtaaattctgctagaccctctgtaaattccgctagacctttgtgtgttttttttgtttatattcaagtggttataatttatagaataaagaaagaataaaaaaagataaaaagaatagatcccagccctgtgtataactcactactttagtcagttccgcagtattacaaaaggatgtcgcaaacgctgtttgctcctctacaaaacagaccttaaaaccctaaaggcttaagtagcaccctcgcaagctcgggcaaatcgctgaatattccttttgtctccgaccatcaggcacctgagtcgctgtctttttcgtgacattcagttcgctgcgctcacggctctggcagtgaatgggggtaaatggcactacaggcgccttttatggattcatgcaaggaaactacccataatacaagaaaagcccgtcacgggcttctcagggcgttttatggcgggtctgctatgtggtgctatctgactttttgctgttcagcagttcctgccctctgattttccagtctgaccacttcggattatcccgtgacaggtcattcagactggctaatgcacccagtaaggcagcggtatcatcaacaggcttacccgtcttactgtcttttctacggggtctgacgctcagtggaacgaaaactcacgttaagggattttggtcatgagattatcaaaaaggatcttcacctagatccttttaaattaaaaatgaagttttaaatcaatctaaagtatatatgagtaaacttggtctgacagttaccaatgcttaatcagtgaggcacctatctcagcgatctgtctatttcgttcatccatagttgcctgactccccgtcgtgtagataactacgatacgggagggcttaccatctggccccagtgctgcaatgataccgcgagaaccacgctcaccggctccagatttatcagcaataaaccagccagccggaagggccgagcgcagaagtggtcctgcaactttatccgcctccatccagtctattaattgttgccgggaagctagagtaagtagttcgccagttaatagtttgcgcaacgttgttgccattgctacaggcatcgtggtgtcacgctcgtcgtttggtatggcttcattcagctccggttcccaacgatcaaggcgagttacatgatcccccatgttgtgcaaaaaagcggttagctccttcggtcctccgatcgttgtcagaagtaagttggccgcagtgttatcactcatggttatggcagcactgcataattctcttactgtcatgccatccgtaagatgcttttctgtgactggtgagtactcaaccaagtcattctgagaatagtgtatgcggcgaccgagttgctcttgcccggcgtcaatacgggataataccgcgccacatagcagaactttaaaagtgctcatcattggaaaacgttcttcggggcgaaaactctcaaggatcttaccgctgttgagatccagttcgatgtaacccactcgtgcacccaactgatcttcagcatcttttactttcaccagcgtttctgggtgagcaaaaacaggaaggcaaaatgccgcaaaaaagggaataagggcgacacggaaatgttgaatactcatactcttcctttttcaatattattgaagcatttatcagggttattgtctcatgagcggatacatatttgaatgtatttagaaaaataaacaaataggggttccgcgcacatttccccgaaaagtgccacctgacgtctaagaaaccattattatcatgacattaacctataaaaataggcgtatcacgaggccctttcgtctcgcgcgtttcggtgatgacggtgaaaacctctgacacatgcagctcccggagacggtcacagcttgtctgtaagcggatgccgggagcagacaagcccgtcagggcgcgtcagcgggtgttggcgggtgtcggggctggcttaactatgcggcatcagagcagattgtactgagagtgcaccatatgcggtgtgaaataccgcacagatgcgtaaggagaaaataccgcatcaggcgccattcgccattcaggctgcgcaactgttgggaagggcgatcggtgcgggcctcttcgctattacgccagctggcgaaagggggatgtgctgcaaggcgattaagttgggtaacgccagggttttcccagtcacgacgttgtaaaacgacggccagtgaattcgttaagacccactttcacatttaagttgtttttctaatccgcatatgatcaattcaaggccgaataagaaggctggctctgcaccttggtgatcaaataattcgatagcttgtcgtaataatggcggcatactatcagtagtaggtgtttccctttcttctttagcgacttgatgctcttgatcttccaatacgcaacctaaagtaaaatgccccacagcgctgagtgcatataatgcattctctagtgaaaaaccttgttggcataaaaaggctaattgattttcgagagtttcatactgtttttctgtaggccgtgtacctaaatgtacttttgctccatcgcgatgacttagtaaagcacatctaaaacttttagcgttattacgtaaaaaatcttgccagctttccccttctaaagggcaaaagtgagtatggtgcctatctaacatctcaatggctaaggcgtcgagcaaagcccgcttattttttacatgccaatacaatgtaggctgctctacacctagcttctgggcgagtttacgggttgttaaaccttcgattccgacctcattaagcagctctaatgcgctgttaatcactttacttttatctaatctagacatcattaattcctaatttttgttgacactctatcattgatagagttattttaccactccctatcagtgatagagaaaagtga

SEQ ID NO: 22 - DNA, 10141 bp, Artificial Sequence
  Description of Artificial Sequence: Synthetic polynucleotide
actacagtatataaggagggtaatatgatcttcgagacaatttctacgtcgaatcacgaagaagttgtgtattgccataacaaggacgccggcttgaaagcaatcatcgcgattcacaacactgtactcggtccggctctgggtggcactcgcatgtggccctacgctagcgaagaggaagcactgaaagatgtccttcgtttatcccgtgggatgacctacaaagctgcggtttcaggtctaaacctgggcggcggtaaagctgtgatctggggtgatccgaataaagacaagtctgaagcgctgtttagagccttcggacggtttgtaaacagcctgggcggacgctacattaccgcggaggacgttggcattgatgttaacgacatggaatatgtgctgcgtgaaactgattacgtcaccggtgtacatcaggttcacggtgggagtggtgatccttctccattcaccgcatatggcactctgcaaggcctgatggccgctctgcaagtgaaattcggtaacgaagacgtaggcaattacagctacgctgttcagggtgtgggtcacgttggcatggaatttgttaaactgctgcgtgagcgcggtgcaaaggttttcgtcactgacatcaacaaagatgcggtccagcgtgctgtggacgaatttggttgtgaggcagtagccctggatgaaatctatgacgttgattgcgacgtgtactccccgaccgctctgggcggcaccgtgaacgataaaactttaccgcgtctgaaatgtaaggtaatctgcggtgcggcaaacaaccagttagctaatgatgagataggcgtggaactggaaaagaaaggcatcctctatgctccggactacgcggtcaacgcgggtgggctgatgaacgttagcctggaaatcgatggatacaaccgcgaacgtgcgatgcgtatgatgcgtaccatttattacaatttgggtcgcattttcgaaatctctaagcgcgacggcatccctacattccgagccgccgatcgtatggctgaagaacgcataacggccatcggtaaactgcgtttaccgcatttgggcgctgcggcaccgcgcttccagggccgacgtggcaactaaaattcactttaacaactaaggggcgaagaatgtcgacgacaaccgttggtgactacttgctgtatcgcttaaacgaaatcggcattgagcacctcttcggagtgccaggtgattacaatctgcaatttctggatcatgtaatcgaccaccctcagctgacttgggtcggctgcactaacgaacttaacgctgcctacgcagctgatggttatgcgcgttgtcgtccggctgcggcactgctgaccaccttcggggttggcgaactgagcgctattaatggcatcgcaggttcctacgcggagtatctgccggtaatacatatcgttggtgcaccgagtctatcagcccagcagcagggcgacctgattcaccactctcttggcgaaggtgatttttccagcttcctgaggatgtcccaaccggtgtctgttgcgcaggctgctctgactcctgataacgcatgcaaggaaatcgaccgcgtactggcggaagtcctcattcagcgtcgtcccggctacctgctgctgtctaccgacgtggctgctgcgccggcggctctgccacaaagcactctttctttgccgaccgccccggatcatcgcgcagttctggctgctttcagcgacgctgctgagcagatgctggctcaggccaaaagcgtctctctactggcggactttctggctgatcgtttcggtgttactcgagcactggccgcgtggcttcagcaggttccgctaccgcacgccactctgttaatgggtaaaggcgttctgagtgaacagcaaccagggttcgtgggtacctacgctggtgcggcatctatcgattcgacgcgtggcgcaatcgaagaagctggggtaattatcggagtgggagttagattttccgacactatcacagcaggcttctcgcagcagatcgacgcccgccgttttatagacattcaacccttcttctctcgtattggcgatcgccagtttgatcacttgccgatgcaggctgccgtcgcagccctgcatcaactgtgtcttcgttatcagcagcagtggtctatcaccgctcctagcccgcctgcactgccgccggctgctggtagcgagctgtcccagaacgcattctggcaggcgatgcagaacttcatccgccctggggacctgttggtggccgaccaaggtactgcggcgttcggcgcagcggcgctgcgcttaccgcagaattgccagctgcttgtgcagccgctgtggggctcaatcggttacagtctgccggccacctttggtgctcagacggcagatacagagcgtcgtgtaatcctaatcattggcgatggttcagcgcaattaactattcaggaactttccagtatgatgcgtgacggcttgaaacctatcatctttctcctgaacaacaacggttacaccgttgaacgggcgattcacggcgcggagcaacgttataacgatatcgctgcttggaattggacccaactgccccaggcgctgagtgttcattgcccagcgcagagctggcgagtcgttgaaacggtgcagctgaccgacgtaatgaaagtcatcgctgcttctccgcgtctgagcttggtagaagttgttctgcctgcaatggatgtcccaccgctgctgcaagcagtgagtgccgctctgaaccagcgcaactcctcttaatttttaaagtaacacacgagctaagaactaaggaggatttatgcgcagcatgcagtttgatgagtacggtgcacccctgaaagcgttctcatatgaagacccgaccccgcaagggaaggaagtagtcgttaggatcgaagcctgtggtgtgtgccactctgatattcatcttcacgagggctacttcgacatgggcggtggcaataaagctgatgttactcgtgctcgcgaactcccttttacattgggtcatgaaatcgttggcgaagtggtagcaactggaccaggtgtcaccggcgctaaaccgggcgacaaacgtattgtgtacccgtggatcgggtgcggcgactgcccgaaatgcaacagtggtgaggatcagtcctgtgcgcgtccacgtaacctgggtgttcacgttgacggtggctattcgacgcacgtaaagataccggacgaaaaattcctgttcgcctacgatggtattcctactgagttagcgggaacctatgcttgcagcggcatcaccgcttatggtgcactgatgaaagcaaaggaagcggctgaaagatctggctacatcggtctgattggcgctggtggcgttggcatggctggtctgatgctggccaaagcagcgatcggggctaaaactgtagtctttgatatcgacgacgcaaaactggaagctgcgacccgtgccggggcggattacgtgttcaactccggtgcaaaagaaacacgcaaggaagttatgaaactaacgaatggtggcctgtctggtgctgttgatttcgttggcagcgataaaagcgctctgtttggaatcaacgccttgggtcagaacggcgtgctggtcataattggactgttcggtggcgctatgactgttccggtacccctgttcccgctgaaagggatcaccgtacgtggctcatacgtaggttccctgcaagagatgagtgatatgatggagttagttcgcgctgggaaagttcctccgatgccggtaaaaactcggccactggacgctgcctgggaaacccttgaggatctacgccatggtaaaatcgtgggccgtgttgttctgaccccataagaaggagatatacatatgacccatcaattaagatcgcgcgatatcatcgctctgggctttatgacatttgcgttgttcgtcggcgcaggtaacattattttccctccaatggtcggcttgcaggcaggcgaacacgtctggactgcggcattcggcttcctcattactgccgttggcctaccggtattaacggtagtggcgctggcaaaagttggcggcggtgttgacagtctcagcacgccaattggtaaagtcgctggcgtactgctggcaacagtttgttacctggcggtggggccgctttttgctacgccgcgtacagctaccgtttcttttgaagtgggcattgcgccgctgacgggtgattccgcgctgccgctgtttatttacagcctggtctatttcgctatcgttattctggtttcgctctatccgggcaagctgctggataccgtgggcaacttccttgcgccgctgaaaattatcgcgctggtcatcctgtctgttgccgcaattatctggccggcgggttctatcagtacggcgactgaggcttatcaaaacgctgcgttttctaacggcttcgtcaacggctatctgaccatggatacgctgggcgcaatggtgtttggtatcgttattgttaacgcggcgcgttctcgtggcgttaccgaagcgcgtctgctgacccgttataccgtctgggctggcctgatggcgggtgttggtctgactctgctgtacctggcgctgttccgtctgggttcagacagcgcgtcgctggtcgatcagtctgcaaacggtgcggcgatcctgcatgcttacgttcagcatacctttggcggcggcggtagcttcctgctggcggcgttaatcttcatcgcctgcctggtcacggcggttggcctgacctgtgcttgtgcagaattcttcgcccagtacgtaccgctctcttatcgtacgctggtgtttatcctcggcggcttctcgatggtggtgtctaacctcggcttgagccagctgattcagatctctgtaccggtgctgaccgccatttatccgccgtgtatcgcactggttgtattaagttttacacgctcatggtggcataattcgtcccgcgtgattgctccgccgatgtttatcagcctgctttttggtattctcgacgggatcaaggcatctgcattcagcgatatcttaccgtcctgggcgcagcgtttaccgctggccgaacaaggtctggcgtggttaatgccaacagtggtgatggtggttctggccattatctgggatcgtgcggcaggtcgtcaggtgacctccagcgctcactaatacgcatggcatggatgaccgatggtagtgtgggctctccccatgcgagagtagggaactgccaggcatcaaataaaacgaaaggctcagtcgaaagactgggcctttcgttttatctgttgtttgtcggtgaacgctctcctgagtaggacaaatccgccgggagcggatttgaacgttgcgaagcaacggcccggagggtggcgggcaggacgcccgccataaactgccaggcatcaaattaagcagaaggccatcctgacggatggcctttttgcgtggccagtgccaagcttgcatgcgtgccagctgcattaatgaagaaatcatgctggaagaataacagctcactcaaaggcggtagtacgggttttgctgcccgcaaacgggctgttctggtgttgctagtttgttatcagaatcgcagatccggcttcagccggtttgccggctgaaagcgctatttcttccagaattgccatgattttttccccacgggaggcgtcactggctcccgtgttgtcggcagctttgattcgataagcagcatcgcctgtttcaggctgtctatgtgtgactgttgagctgtaacaagttgtctcaggtgttcaatttcatgttctagttgctttgttttactggtttcacctgttctattaggtgttacatgctgttcatctgttacattgtcgatctgttcatggtgaacagctttgaatgcaccaaaaactcgtaaaagctctgatgtatctatcttttttacaccgttttcatctgtgcatatggacagttttccctttgatatgtaacggtgaacagttgttctacttttgtttgttagtcttgatgcttcactgatagatacaagagccataagaacctcagatccttccgtatttagccagtatgttctctagtgtggttcgttgtttttgcgtgagccatgagaacgaaccattgagatcatacttactttgcatgtcactcaaaaattttgcctcaaaactggtgagctgaatttttgcagttaaagcatcgtgtagtgtttttcttagtccgttatgtaggtaggaatctgatgtaatggttgttggtattttgtcaccattcatttttatctggttgttctcaagttcggttacgagatccatttgtctatctagttcaacttggaaaatcaacgtatcagtcgggcggcctcgcttatcaaccaccaatttcatattgctgtaagtgtttaaatctttacttattggtttcaaaacccattggttaagccttttaaactcatggtagttattttcaagcattaacatgaacttaaattcatcaaggctaatctctatatttgccttgtgagttttcttttgtgttagttcttttaataaccactcataaatcctcatagagtatttgttttcaaaagacttaacatgttccagattatattttatgaatttttttaactggaaaagataaggcaatatctcttcactaaaaactaattctaatttttcgcttgagaacttggcatagtttgtccactggaaaatctcaaagcctttaaccaaaggattcctgatttccacagttctcgtcatcagctctctggttgctttagctaatacaccataagcattttccctactgatgttcatcatctgagcgtattggttataagtgaacgataccgtccgttctttccttgtagggttttcaatcgtggggttgagtagtgccacacagcataaaattagcttggtttcatgctccgttaagtcatagcgactaatcgctagttcatttgctttgaaaacaactaattcagacatacatctcaattggtctaggtgattttaatcactataccaattgagatgggctagtcaatgataattactagtccttttcctttgagttgtgggtatctgtaaattctgctagacctttgctggaaaacttgtaaattctgctagaccctctgtaaattccgctagacctttgtgtgttttttttgtttatattcaagtggttataatttatagaataaagaaagaataaaaaaagataaaaagaatagatcccagccctgtgtataactcactactttagtcagttccgcagtattacaaaaggatgtcgcaaacgctgtttgctcctctacaaaacagaccttaaaaccctaaaggcttaagtagcaccctcgcaagctcgggcaaatcgctgaatattccttttgtctccgaccatcaggcacctgagtcgctgtctttttcgtgacattcagttcgctgcgctcacggctctggcagtgaatgggggtaaatggcactacaggcgccttttatggattcatgcaaggaaactacccataatacaagaaaagcccgtcacgggcttctcagggcgttttatggcgggtctgctatgtggtgctatctgactttttgctgttcagcagttcctgccctctgattttccagtctgaccacttcggattatcccgtgacaggtcattcagactggctaatgcacccagtaaggcagcggtatcatcaacaggcttacccgtcttactgtcttttctacggggtctgacgctcagtggaacgaaaactcacgttaagggattttggtcatgagattatcaaaaaggatcttcacctagatccttttaaattaaaaatgaagttttaaatcaatctaaagtatatatgagtaaacttggtctgacagttaccaatgcttaatcagtgaggcacctatctcagcgatctgtctatttcgttcatccatagttgcctgactccccgtcgtgtagataactacgatacgggagggcttaccatctggccccagtgctgcaatgataccgcgagaaccacgctcaccggctccagatttatcagcaataaaccagccagccggaagggccgagcgcagaagtggtcctgcaactttatccgcctccatccagtctattaattgttgccgggaagctagagtaagtagttcgccagttaatagtttgcgcaacgttgttgccattgctacaggcatcgtggtgtcacgctcgtcgtttggtatggcttcattcagctccggttcccaacgatcaaggcgagttacatgatcccccatgttgtgcaaaaaagcggttagctccttcggtcctccgatcgttgtcagaagtaagttggccgcagtgttatcactcatggttatggcagcactgcataattctcttactgtcatgccatccgtaagatgcttttctgtgactggtgagtactcaaccaagtcattctgagaatagtgtatgcggcgaccgagttgctcttgcccggcgtcaatacgggataataccgcgccacatagcagaactttaaaagtgctcatcattggaaaacgttcttcggggcgaaaactctcaaggatcttaccgctgttgagatccagttcgatgtaacccactcgtgcacccaactgatcttcagcatcttttactttcaccagcgtttctgggtgagcaaaaacaggaaggcaaaatgccgcaaaaaagggaataagggcgacacggaaatgttgaatactcatactcttcctttttcaatattattgaagcatttatcagggttattgtctcatgagcggatacatatttgaatgtatttagaaaaataaacaaataggggttccgcgcacatttccccgaaaagtgccacctgacgtctaagaaaccattattatcatgacattaacctataaaaataggcgtatcacgaggccctttcgtctcgcgcgtttcggtgatgacggtgaaaacctctgacacatgcagctcccggagacggtcacagcttgtctgtaagcggatgccgggagcagacaagcccgtcagggcgcgtcagcgggtgttggcgggtgtcggggctggcttaactatgcggcatcagagcagattgtactgagagtgcaccatatgcggtgtgaaataccgcacagatgcgtaaggagaaaataccgcatcaggcgccattcgccattcaggctgcgcaactgttgggaagggcgatcggtgcgggcctcttcgctattacgccagctggcgaaagggggatgtgctgcaaggcgattaagttgggtaacgccagggttttcccagtcacgacgttgtaaaacgacggccagtgaattcgttaagacccactttcacatttaagttgtttttctaatccgcatatgatcaattcaaggccgaataagaaggctggctctgcaccttggtgatcaaataattcgatagcttgtcgtaataatggcggcatactatcagtagtaggtgtttccctttcttctttagcgacttgatgctcttgatcttccaatacgcaacctaaagtaaaatgccccacagcgctgagtgcatataatgcattctctagtgaaaaaccttgttggcataaaaaggctaattgattttcgagagtttcatactgtttttctgtaggccgtgtacctaaatgtacttttgctccatcgcgatgacttagtaaagcacatctaaaacttttagcgttattacgtaaaaaatcttgccagctttccccttctaaagggcaaaagtgagtatggtgcctatctaacatctcaatggctaaggcgtcgagcaaagcccgcttattttttacatgccaatacaatgtaggctgctctacacctagcttctgggcgagtttacgggttgttaaaccttcgattccgacctcattaagcagctctaatgcgctgttaatcactttacttttatctaatctagacatcattaattcctaatttttgttgacactctatcattgatagagttattttaccactccctatcagtgatagagaaaagtga

SEQ ID NO: 23 - DNA, 10132 bp, Artificial Sequence
  Description of Artificial Sequence: Synthetic polynucleotide
aatattcacgtaaggaggtaatagatgcagatcttcgacactttgcaatcaatgggccatgagcaggttgtcctatgtagcgataagaccacgggtctgcgcgccattatcgctatacacgatacatccttagggccggcgcttggtggtacccgtatgtggcagtatgcaactgacgacgatgctattactgacgcactccgtctgtctcggggcatgacctacaaagctgcggtttctggcgtaaatctgggcggtggtaaagccgttatcatcggaaaccctcacagtgataaaagcgaagcgctgtttcgcgcttacggcagaatggtggaatcccagcgtgggcgttacatcaccgccgaagacgttggtactagcgtacgtgatatggagtggattcgcatggaaaccaaatatgtaacgggcgtgggtggcaacggaggctctggtgacccctctccagttaccgctctgggtgtttactcgggcatgaaggcatgcgctaaatcagtctatggtactgatgcgctgagcggtaaaaggatcgtggttcagggcgcgggtaacgttgcatcccatctggttcacagtctggtaaaagaaggcgctgtggttttcgtcactgacatctacgaagaaaaggccaaagcattagcggctgaaacgggcgctaccgtgattcgcaccgacgaggtttttactacacaatgcgatatcttctctccgaacgctctgggggccgtcctgaacgatgaaactattccgcagctcacatgcgctatcgtagctggtggtgcaaacaatcagcttaaaatcgaacaacgtcacgccacggctctgcaagagaaaggcattctgtatgcgccggattacgtaatcaacgccgggggcctcatgaatgtggcgagcgaagttgacggctacaaccgtgaaaaggttatgcgccaggctgaaggtatttacgatattactatgaacatcctaaataccgcgcgtgagcgtaacatcctgaccatcgaagcatccaacgcgattgctgaagagcggatcaacaaagttcgccatgttcacgggaacttcatcggttccccgtctattcgcggagtataataaatcaaaacaccaaattaaggagaaattttatgtcgacgacaaccgttggtgactacttgctgtatcgcttaaacgaaatcggcattgagcacctcttcggagtgccaggtgattacaatctgcaatttctggatcatgtaatcgaccaccctcagctgacttgggtcggctgcactaacgaacttaacgctgcctacgcagctgatggttatgcgcgttgtcgtccggctgcggcactgctgaccaccttcggggttggcgaactgagcgctattaatggcatcgcaggttcctacgcggagtatctgccggtaatacatatcgttggtgcaccgagtctatcagcccagcagcagggcgacctgattcaccactctcttggcgaaggtgatttttccagcttcctgaggatgtcccaaccggtgtctgttgcgcaggctgctctgactcctgataacgcatgcaaggaaatcgaccgcgtactggcggaagtcctcattcagcgtcgtcccggctacctgctgctgtctaccgacgtggctgctgcgccggcggctctgccacaaagcactctttctttgccgaccgccccggatcatcgcgcagttctggctgctttcagcgacgctgctgagcagatgctggctcaggccaaaagcgtctctctactggcggactttctggctgatcgtttcggtgttactcgagcactggccgcgtggcttcagcaggttccgctaccgcacgccactctgttaatgggtaaaggcgttctgagtgaacagcaaccagggttcgtgggtacctacgctggtgcggcatctatcgattcgacgcgtggcgcaatcgaagaagctggggtaattatcggagtgggagttagattttccgacactatcacagcaggcttctcgcagcagatcgacgcccgccgttttatagacattcaacccttcttctctcgtattggcgatcgccagtttgatcacttgccgatgcaggctgccgtcgcagccctgcatcaactgtgtcttcgttatcagcagcagtggtctatcaccgctcctagcccgcctgcactgccgccggctgctggtagcgagctgtcccagaacgcattctggcaggcgatgcagaacttcatccgccctggggacctgttggtggccgaccaaggtactgcggcgttcggcgcagcggcgctgcgcttaccgcagaattgccagctgcttgtgcagccgctgtggggctcaatcggttacagtctgccggccacctttggtgctcagacggcagatacagagcgtcgtgtaatcctaatcattggcgatggttcagcgcaattaactattcaggaactttccagtatgatgcgtgacggcttgaaacctatcatctttctcctgaacaacaacggttacaccgttgaacgggcgattcacggcgcggagcaacgttataacgatatcgctgcttggaattggacccaactgccccaggcgctgagtgttcattgcccagcgcagagctggcgagtcgttgaaacggtgcagctgaccgacgtaatgaaagtcatcgctgcttctccgcgtctgagcttggtagaagttgttctgcctgcaatggatgtcccaccgctgctgcaagcagtgagtgccgctctgaaccagcgcaactcctcttaatttttaaagtaacacacgagctaagaactaaggaggatttatgcgcagcatgcagtttgatgagtacggtgcacccctgaaagcgttctcatatgaagacccgaccccgcaagggaaggaagtagtcgttaggatcgaagcctgtggtgtgtgccactctgatattcatcttcacgagggctacttcgacatgggcggtggcaataaagctgatgttactcgtgctcgcgaactcccttttacattgggtcatgaaatcgttggcgaagtggtagcaactggaccaggtgtcaccggcgctaaaccgggcgacaaacgtattgtgtacccgtggatcgggtgcggcgactgcccgaaatgcaacagtggtgaggatcagtcctgtgcgcgtccacgtaacctgggtgttcacgttgacggtggctattcgacgcacgtaaagataccggacgaaaaattcctgttcgcctacgatggtattcctactgagttagcgggaacctatgcttgcagcggcatcaccgcttatggtgcactgatgaaagcaaaggaagcggctgaaagatctggctacatcggtctgattggcgctggtggcgttggcatggctggtctgatgctggccaaagcagcgatcggggctaaaactgtagtctttgatatcgacgacgcaaaactggaagctgcgacccgtgccggggcggattacgtgttcaactccggtgcaaaagaaacacgcaaggaagttatgaaactaacgaatggtggcctgtctggtgctgttgatttcgttggcagcgataaaagcgctctgtttggaatcaacgccttgggtcagaacggcgtgctggtcataattggactgttcggtggcgctatgactgttccggtacccctgttcccgctgaaagggatcaccgtacgtggctcatacgtaggttccctgcaagagatgagtgatatgatggagttagttcgcgctgggaaagttcctccgatgccggtaaaaactcggccactggacgctgcctgggaaacccttgaggatctacgccatggtaaaatcgtgggccgtgttgttctgaccccataagaaggagatatacatatgacccatcaattaagatcgcgcgatatcatcgctctgggctttatgacatttgcgttgttcgtcggcgcaggtaacattattttccctccaatggtcggcttgcaggcaggcgaacacgtctggactgcggcattcggcttcctcattactgccgttggcctaccggtattaacggtagtggcgctggcaaaagttggcggcggtgttgacagtctcagcacgccaattggtaaagtcgctggcgtactgctggcaacagtttgttacctggcggtggggccgctttttgctacgccgcgtacagctaccgtttcttttgaagtgggcattgcgccgctgacgggtgattccgcgctgccgctgtttatttacagcctggtctatttcgctatcgttattctggtttcgctctatccgggcaagctgctggataccgtgggcaacttccttgcgccgctgaaaattatcgcgctggtcatcctgtctgttgccgcaattatctggccggcgggttctatcagtacggcgactgaggcttatcaaaacgctgcgttttctaacggcttcgtcaacggctatctgaccatggatacgctgggcgcaatggtgtttggtatcgttattgttaacgcggcgcgttctcgtggcgttaccgaagcgcgtctgctgacccgttataccgtctgggctggcctgatggcgggtgttggtctgactctgctgtacctggcgctgttccgtctgggttcagacagcgcgtcgctggtcgatcagtctgcaaacggtgcggcgatcctgcatgcttacgttcagcatacctttggcggcggcggtagcttcctgctggcggcgttaatcttcatcgcctgcctggtcacggcggttggcctgacctgtgcttgtgcagaattcttcgcccagtacgtaccgctctcttatcgtacgctggtgtttatcctcggcggcttctcgatggtggtgtctaacctcggcttgagccagctgattcagatctctgtaccggtgctgaccgccatttatccgccgtgtatcgcactggttgtattaagttttacacgctcatggtggcataattcgtcccgcgtgattgctccgccgatgtttatcagcctgctttttggtattctcgacgggatcaaggcatctgcattcagcgatatcttaccgtcctgggcgcagcgtttaccgctggccgaacaaggtctggcgtggttaatgccaacagtggtgatggtggttctggccattatctgggatcgtgcggcaggtcgtcaggtgacctccagcgctcactaatacgcatggcatggatgaccgatggtagtgtgggctctccccatgcgagagtagggaactgccaggcatcaaataaaacgaaaggctcagtcgaaagactgggcctttcgttttatctgttgtttgtcggtgaacgctctcctgagtaggacaaatccgccgggagcggatttgaacgttgcgaagcaacggcccggagggtggcgggcaggacgcccgccataaactgccaggcatcaaattaagcagaaggccatcctgacggatggcctttttgcgtggccagtgccaagcttgcatgcgtgccagctgcattaatgaagaaatcatgctggaagaataacagctcactcaaaggcggtagtacgggttttgctgcccgcaaacgggctgttctggtgttgctagtttgttatcagaatcgcagatccggcttcagccggtttgccggctgaaagcgctatttcttccagaattgccatgattttttccccacgggaggcgtcactggctcccgtgttgtcggcagctttgattcgataagcagcatcgcctgtttcaggctgtctatgtgtgactgttgagctgtaacaagttgtctcaggtgttcaatttcatgttctagttgctttgttttactggtttcacctgttctattaggtgttacatgctgttcatctgttacattgtcgatctgttcatggtgaacagctttgaatgcaccaaaaactcgtaaaagctctgatgtatctatcttttttacaccgttttcatctgtgcatatggacagttttccctttgatatgtaacggtgaacagttgttctacttttgtttgttagtcttgatgcttcactgatagatacaagagccataagaacctcagatccttccgtatttagccagtatgttctctagtgtggttcgttgtttttgcgtgagccatgagaacgaaccattgagatcatacttactttgcatgtcactcaaaaattttgcctcaaaactggtgagctgaatttttgcagttaaagcatcgtgtagtgtttttcttagtccgttatgtaggtaggaatctgatgtaatggttgttggtattttgtcaccattcatttttatctggttgttctcaagttcggttacgagatccatttgtctatctagttcaacttggaaaatcaacgtatcagtcgggcggcctcgcttatcaaccaccaatttcatattgctgtaagtgtttaaatctttacttattggtttcaaaacccattggttaagccttttaaactcatggtagttattttcaagcattaacatgaacttaaattcatcaaggctaatctctatatttgccttgtgagttttcttttgtgttagttcttttaataaccactcataaatcctcatagagtatttgttttcaaaagacttaacatgttccagattatattttatgaatttttttaactggaaaagataaggcaatatctcttcactaaaaactaattctaatttttcgcttgagaacttggcatagtttgtccactggaaaatctcaaagcctttaaccaaaggattcctgatttccacagttctcgtcatcagctctctggttgctttagctaatacaccataagcattttccctactgatgttcatcatctgagcgtattggttataagtgaacgataccgtccgttctttccttgtagggttttcaatcgtggggttgagtagtgccacacagcataaaattagcttggtttcatgctccgttaagtcatagcgactaatcgctagttcatttgctttgaaaacaactaattcagacatacatctcaattggtctaggtgattttaatcactataccaattgagatgggctagtcaatgataattactagtccttttcctttgagttgtgggtatctgtaaattctgctagacctttgctggaaaacttgtaaattctgctagaccctctgtaaattccgctagacctttgtgtgttttttttgtttatattcaagtggttataatttatagaataaagaaagaataaaaaaagataaaaagaatagatcccagccctgtgtataactcactactttagtcagttccgcagtattacaaaaggatgtcgcaaacgctgtttgctcctctacaaaacagaccttaaaaccctaaaggcttaagtagcaccctcgcaagctcgggcaaatcgctgaatattccttttgtctccgaccatcaggcacctgagtcgctgtctttttcgtgacattcagttcgctgcgctcacggctctggcagtgaatgggggtaaatggcactacaggcgccttttatggattcatgcaaggaaactacccataatacaagaaaagcccgtcacgggcttctcagggcgttttatggcgggtctgctatgtggtgctatctgactttttgctgttcagcagttcctgccctctgattttccagtctgaccacttcggattatcccgtgacaggtcattcagactggctaatgcacccagtaaggcagcggtatcatcaacaggcttacccgtcttactgtcttttctacggggtctgacgctcagtggaacgaaaactcacgttaagggattttggtcatgagattatcaaaaaggatcttcacctagatccttttaaattaaaaatgaagttttaaatcaatctaaagtatatatgagtaaacttggtctgacagttaccaatgcttaatcagtgaggcacctatctcagcgatctgtctatttcgttcatccatagttgcctgactccccgtcgtgtagataactacgatacgggagggcttaccatctggccccagtgctgcaatgataccgcgagaaccacgctcaccggctccagatttatcagcaataaaccagccagccggaagggccgagcgcagaagtggtcctgcaactttatccgcctccatccagtctattaattgttgccgggaagctagagtaagtagttcgccagttaatagtttgcgcaacgttgttgccattgctacaggcatcgtggtgtcacgctcgtcgtttggtatggcttcattcagctccggttcccaacgatcaaggcgagttacatgatcccccatgttgtgcaaaaaagcggttagctccttcggtcctccgatcgttgtcagaagtaagttggccgcagtgttatcactcatggttatggcagcactgcataattctcttactgtcatgccatccgtaagatgcttttctgtgactggtgagtactcaaccaagtcattctgagaatagtgtatgcggcgaccgagttgctcttgcccggcgtcaatacgggataataccgcgccacatagcagaactttaaaagtgctcatcattggaaaacgttcttcggggcgaaaactctcaaggatcttaccgctgttgagatccagttcgatgtaacccactcgtgcacccaactgatcttcagcatcttttactttcaccagcgtttctgggtgagcaaaaacaggaaggcaaaatgccgcaaaaaagggaataagggcgacacggaaatgttgaatactcatactcttcctttttcaatattattgaagcatttatcagggttattgtctcatgagcggatacatatttgaatgtatttagaaaaataaacaaataggggttccgcgcacatttccccgaaaagtgccacctgacgtctaagaaaccattattatcatgacattaacctataaaaataggcgtatcacgaggccctttcgtctcgcgcgtttcggtgatgacggtgaaaacctctgacacatgcagctcccggagacggtcacagcttgtctgtaagcggatgccgggagcagacaagcccgtcagggcgcgtcagcgggtgttggcgggtgtcggggctggcttaactatgcggcatcagagcagattgtactgagagtgcaccatatgcggtgtgaaataccgcacagatgcgtaaggagaaaataccgcatcaggcgccattcgccattcaggctgcgcaactgttgggaagggcgatcggtgcgggcctcttcgctattacgccagctggcgaaagggggatgtgctgcaaggcgattaagttgggtaacgccagggttttcccagtcacgacgttgtaaaacgacggccagtgaattcgttaagacccactttcacatttaagttgtttttctaatccgcatatgatcaattcaaggccgaataagaaggctggctctgcaccttggtgatcaaataattcgatagcttgtcgtaataatggcggcatactatcagtagtaggtgtttccctttcttctttagcgacttgatgctcttgatcttccaatacgcaacctaaagtaaaatgccccacagcgctgagtgcatataatgcattctctagtgaaaaaccttgttggcataaaaaggctaattgattttcgagagtttcatactgtttttctgtaggccgtgtacctaaatgtacttttgctccatcgcgatgacttagtaaagcacatctaaaacttttagcgttattacgtaaaaaatcttgccagctttccccttctaaagggcaaaagtgagtatggtgcctatctaacatctcaatggctaaggcgtcgagcaaagcccgcttattttttacatgccaatacaatgtaggctgctctacacctagcttctgggcgagtttacgggttgttaaaccttcgattccgacctcattaagcagctctaatgcgctgttaatcactttacttttatctaatctagacatcattaattcctaatttttgttgacactctatcattgatagagttattttaccactccctatcagtgatagagaaaagtga

SEQ ID NO: 24 - DNA, 10148 bp, Artificial Sequence
  Description of Artificial Sequence: Synthetic polynucleotide
aatattcacgtaaggaggtaatagatgcagatcttcgacactttgcaatcaatgggccatgagcaggttgtcctatgtagcgataagaccacgggtctgcgcgccattatcgctatacacgatacatccttagggccggcgcttggtggtacccgtatgtggcagtatgcaactgacgacgatgctattactgacgcactccgtctgtctcggggcatgacctacaaagctgcggtttctggcgtaaatctgggcggtggtaaagccgttatcatcggaaaccctcacagtgataaaagcgaagcgctgtttcgcgcttacggcagaatggtggaatcccagcgtgggcgttacatcaccgccgaagacgttggtactagcgtacgtgatatggagtggattcgcatggaaaccaaatatgtaacgggcgtgggtggcaacggaggctctggtgacccctctccagttaccgctctgggtgtttactcgggcatgaaggcatgcgctaaatcagtctatggtactgatgcgctgagcggtaaaaggatcgtggttcagggcgcgggtaacgttgcatcccatctggttcacagtctggtaaaagaaggcgctgtggttttcgtcactgacatctacgaagaaaaggccaaagcattagcggctgaaacgggcgctaccgtgattcgcaccgacgaggtttttactacacaatgcgatatcttctctccgaacgctctgggggccgtcctgaacgatgaaactattccgcagctcacatgcgctatcgtagctggtggtgcaaacaatcagcttaaaatcgaacaacgtcacgccacggctctgcaagagaaaggcattctgtatgcgccggattacgtaatcaacgccgggggcctcatgaatgtggcgagcgaagttgacggctacaaccgtgaaaaggttatgcgccaggctgaaggtatttacgatattactatgaacatcctaaataccgcgcgtgagcgtaacatcctgaccatcgaagcatccaacgcgattgctgaagagcggatcaacaaagttcgccatgttcacgggaacttcatcggttccccgtctattcgcggagtataataaatcaaaacaccaaattaaggagaaattttatgtcgacgacaaccgttggtgactacttgctgtatcgcttaaacgaaatcggcattgagcacctcttcggagtgccaggtgattacaatctgcaatttctggatcatgtaatcgaccaccctcagctgacttgggtcggctgcactaacgaacttaacgctgcctacgcagctgatggttatgcgcgttgtcgtccggctgcggcactgctgaccaccttcggggttggcgaactgagcgctattaatggcatcgcaggttcctacgcggagtatctgccggtaatacatatcgttggtgcaccgagtctatcagcccagcagcagggcgacctgattcaccactctcttggcgaaggtgatttttccagcttcctgaggatgtcccaaccggtgtctgttgcgcaggctgctctgactcctgataacgcatgcaaggaaatcgaccgcgtactggcggaagtcctcattcagcgtcgtcccggctacctgctgctgtctaccgacgtggctgctgcgccggcggctctgccacaaagcactctttctttgccgaccgccccggatcatcgcgcagttctggctgctttcagcgacgctgctgagcagatgctggctcaggccaaaagcgtctctctactggcggactttctggctgatcgtttcggtgttactcgagcactggccgcgtggcttcagcaggttccgctaccgcacgccactctgttaatgggtaaaggcgttctgagtgaacagcaaccagggttcgtgggtacctacgctggtgcggcatctatcgattcgacgcgtggcgcaatcgaagaagctggggtaattatcggagtgggagttagattttccgacactatcacagcaggcttctcgcagcagatcgacgcccgccgttttatagacattcaacccttcttctctcgtattggcgatcgccagtttgatcacttgccgatgcaggctgccgtcgcagccctgcatcaactgtgtcttcgttatcagcagcagtggtctatcaccgctcctagcccgcctgcactgccgccggctgctggtagcgagctgtcccagaacgcattctggcaggcgatgcagaacttcatccgccctggggacctgttggtggccgaccaaggtactgcggcgttcggcgcagcggcgctgcgcttaccgcagaattgccagctgcttgtgcagccgctgtggggctcaatcggttacagtctgccggccacctttggtgctcagacggcagatacagagcgtcgtgtaatcctaatcattggcgatggttcagcgcaattaactattcaggaactttccagtatgatgcgtgacggcttgaaacctatcatctttctcctgaacaacaacggttacaccgttgaacgggcgattcacggcgcggagcaacgttataacgatatcgctgcttggaattggacccaactgccccaggcgctgagtgttcattgcccagcgcagagctggcgagtcgttgaaacggtgcagctgaccgacgtaatgaaagtcatcgctgcttctccgcgtctgagcttggtagaagttgttctgcctgcaatggatgtcccaccgctgctgcaagcagtgagtgccgctctgaaccagcgcaactcctcttaattggataaagaataaggaggtattttatgacagcggagcagcaaaatggggtatccgactcacgccgtttcgaatttcaggaatttggtggccctatcgccccacagacctatcagctccccgcaccggctagcgatgaagttttgttaaaggtgaactactgcggtgtctgtcacagtgatgttcatcttcacgacggctacttcgagctgggtggcgataaacgtctgaacttcgctatgccgctgccgctgacgctgggtcacgaagtaattggcaccgttgtggctgtcggcgaccaggttactggtgtaaaaccgggggaccagcgactgatctatccgtggataggttgcggaaaatgcggcgcgtgtcaaaaaggagaagaaaacctgtgcgttactcctgcacatctgggcgtgaacaagccgggcggttacgctgatcacatcgttgtaccccattctcgctaccttctggacatttcgggtctgaacccgggtgatgccgctaccctcgcgtgctccggcctgaccactttcagcgcgatcaacaaagtgttgccgcttgcagatgaccagtggattgttgttatcggttgtggtggcctcggccagatggcgctgcgtatcctgcaagctatgggaattggcaatgttatcggtattgacctgtctgaagagaaacggaaactggctcatgaaagcggtgcacgtcactccttcgatccaaacactccgaagctgaaccgcgtggtcgccgaaacctgcccgggtacggtacaggccgcgttagactttgtgggcaatgagcaaactgctcagctggcactgtctctgcttggaaaaggtggcaaatatgttcctgtcgggctgcacggcggcgagctgcgttacccattgccgatcatcacgaacaaagctgtaagtatcatcggttcttacgttggtaccctgaaagaactggaagacttagttgctttcgccaaggaaaagaatctgccgccaattcatattgaacaccgcccgctggaatcggcggctcaggccgtagaggacctggaaaaaggacaggttgctgggcgtgttatcctggatgcaggtaactaagaaggagatatacatatgacccatcaattaagatcgcgcgatatcatcgctctgggctttatgacatttgcgttgttcgtcggcgcaggtaacattattttccctccaatggtcggcttgcaggcaggcgaacacgtctggactgcggcattcggcttcctcattactgccgttggcctaccggtattaacggtagtggcgctggcaaaagttggcggcggtgttgacagtctcagcacgccaattggtaaagtcgctggcgtactgctggcaacagtttgttacctggcggtggggccgctttttgctacgccgcgtacagctaccgtttcttttgaagtgggcattgcgccgctgacgggtgattccgcgctgccgctgtttatttacagcctggtctatttcgctatcgttattctggtttcgctctatccgggcaagctgctggataccgtgggcaacttccttgcgccgctgaaaattatcgcgctggtcatcctgtctgttgccgcaattatctggccggcgggttctatcagtacggcgactgaggcttatcaaaacgctgcgttttctaacggcttcgtcaacggctatctgaccatggatacgctgggcgcaatggtgtttggtatcgttattgttaacgcggcgcgttctcgtggcgttaccgaagcgcgtctgctgacccgttataccgtctgggctggcctgatggcgggtgttggtctgactctgctgtacctggcgctgttccgtctgggttcagacagcgcgtcgctggtcgatcagtctgcaaacggtgcggcgatcctgcatgcttacgttcagcatacctttggcggcggcggtagcttcctgctggcggcgttaatcttcatcgcctgcctggtcacggcggttggcctgacctgtgcttgtgcagaattcttcgcccagtacgtaccgctctcttatcgtacgctggtgtttatcctcggcggcttctcgatggtggtgtctaacctcggcttgagccagctgattcagatctctgtaccggtgctgaccgccatttatccgccgtgtatcgcactggttgtattaagttttacacgctcatggtggcataattcgtcccgcgtgattgctccgccgatgtttatcagcctgctttttggtattctcgacgggatcaaggcatctgcattcagcgatatcttaccgtcctgggcgcagcgtttaccgctggccgaacaaggtctggcgtggttaatgccaacagtggtgatggtggttctggccattatctgggatcgtgcggcaggtcgtcaggtgacctccagcgctcactaatacgcatggcatggatgaccgatggtagtgtgggctctccccatgcgagagtagggaactgccaggcatcaaataaaacgaaaggctcagtcgaaagactgggcctttcgttttatctgttgtttgtcggtgaacgctctcctgagtaggacaaatccgccgggagcggatttgaacgttgcgaagcaacggcccggagggtggcgggcaggacgcccgccataaactgccaggcatcaaattaagcagaaggccatcctgacggatggcctttttgcgtggccagtgccaagcttgcatgcgtgccagctgcattaatgaagaaatcatgctggaagaataacagctcactcaaaggcggtagtacgggttttgctgcccgcaaacgggctgttctggtgttgctagtttgttatcagaatcgcagatccggcttcagccggtttgccggctgaaagcgctatttcttccagaattgccatgattttttccccacgggaggcgtcactggctcccgtgttgtcggcagctttgattcgataagcagcatcgcctgtttcaggctgtctatgtgtgactgttgagctgtaacaagttgtctcaggtgttcaatttcatgttctagttgctttgttttactggtttcacctgttctattaggtgttacatgctgttcatctgttacattgtcgatctgttcatggtgaacagctttgaatgcaccaaaaactcgtaaaagctctgatgtatctatcttttttacaccgttttcatctgtgcatatggacagttttccctttgatatgtaacggtgaacagttgttctacttttgtttgttagtcttgatgcttcactgatagatacaagagccataagaacctcagatccttccgtatttagccagtatgttctctagtgtggttcgttgtttttgcgtgagccatgagaacgaaccattgagatcatacttactttgcatgtcactcaaaaattttgcctcaaaactggtgagctgaatttttgcagttaaagcatcgtgtagtgtttttcttagtccgttatgtaggtaggaatctgatgtaatggttgttggtattttgtcaccattcatttttatctggttgttctcaagttcggttacgagatccatttgtctatctagttcaacttggaaaatcaacgtatcagtcgggcggcctcgcttatcaaccaccaatttcatattgctgtaagtgtttaaatctttacttattggtttcaaaacccattggttaagccttttaaactcatggtagttattttcaagcattaacatgaacttaaattcatcaaggctaatctctatatttgccttgtgagttttcttttgtgttagttcttttaataaccactcataaatcctcatagagtatttgttttcaaaagacttaacatgttccagattatattttatgaatttttttaactggaaaagataaggcaatatctcttcactaaaaactaattctaatttttcgcttgagaacttggcatagtttgtccactggaaaatctcaaagcctttaaccaaaggattcctgatttccacagttctcgtcatcagctctctggttgctttagctaatacaccataagcattttccctactgatgttcatcatctgagcgtattggttataagtgaacgataccgtccgttctttccttgtagggttttcaatcgtggggttgagtagtgccacacagcataaaattagcttggtttcatgctccgttaagtcatagcgactaatcgctagttcatttgctttgaaaacaactaattcagacatacatctcaattggtctaggtgattttaatcactataccaattgagatgggctagtcaatgataattactagtccttttcctttgagttgtgggtatctgtaaattctgctagacctttgctggaaaacttgtaaattctgctagaccctctgtaaattccgctagacctttgtgtgttttttttgtttatattcaagtggttataatttatagaataaagaaagaataaaaaaagataaaaagaatagatcccagccctgtgtataactcactactttagtcagttccgcagtattacaaaaggatgtcgcaaacgctgtttgctcctctacaaaacagaccttaaaaccctaaaggcttaagtagcaccctcgcaagctcgggcaaatcgctgaatattccttttgtctccgaccatcaggcacctgagtcgctgtctttttcgtgacattcagttcgctgcgctcacggctctggcagtgaatgggggtaaatggcactacaggcgccttttatggattcatgcaaggaaactacccataatacaagaaaagcccgtcacgggcttctcagggcgttttatggcgggtctgctatgtggtgctatctgactttttgctgttcagcagttcctgccctctgattttccagtctgaccacttcggattatcccgtgacaggtcattcagactggctaatgcacccagtaaggcagcggtatcatcaacaggcttacccgtcttactgtcttttctacggggtctgacgctcagtggaacgaaaactcacgttaagggattttggtcatgagattatcaaaaaggatcttcacctagatccttttaaattaaaaatgaagttttaaatcaatctaaagtatatatgagtaaacttggtctgacagttaccaatgcttaatcagtgaggcacctatctcagcgatctgtctatttcgttcatccatagttgcctgactccccgtcgtgtagataactacgatacgggagggcttaccatctggccccagtgctgcaatgataccgcgagaaccacgctcaccggctccagatttatcagcaataaaccagccagccggaagggccgagcgcagaagtggtcctgcaactttatccgcctccatccagtctattaattgttgccgggaagctagagtaagtagttcgccagttaatagtttgcgcaacgttgttgccattgctacaggcatcgtggtgtcacgctcgtcgtttggtatggcttcattcagctccggttcccaacgatcaaggcgagttacatgatcccccatgttgtgcaaaaaagcggttagctccttcggtcctccgatcgttgtcagaagtaagttggccgcagtgttatcactcatggttatggcagcactgcataattctcttactgtcatgccatccgtaagatgcttttctgtgactggtgagtactcaaccaagtcattctgagaatagtgtatgcggcgaccgagttgctcttgcccggcgtcaatacgggataataccgcgccacatagcagaactttaaaagtgctcatcattggaaaacgttcttcggggcgaaaactctcaaggatcttaccgctgttgagatccagttcgatgtaacccactcgtgcacccaactgatcttcagcatcttttactttcaccagcgtttctgggtgagcaaaaacaggaaggcaaaatgccgcaaaaaagggaataagggcgacacggaaatgttgaatactcatactcttcctttttcaatattattgaagcatttatcagggttattgtctcatgagcggatacatatttgaatgtatttagaaaaataaacaaataggggttccgcgcacatttccccgaaaagtgccacctgacgtctaagaaaccattattatcatgacattaacctataaaaataggcgtatcacgaggccctttcgtctcgcgcgtttcggtgatgacggtgaaaacctctgacacatgcagctcccggagacggtcacagcttgtctgtaagcggatgccgggagcagacaagcccgtcagggcgcgtcagcgggtgttggcgggtgtcggggctggcttaactatgcggcatcagagcagattgtactgagagtgcaccatatgcggtgtgaaataccgcacagatgcgtaaggagaaaataccgcatcaggcgccattcgccattcaggctgcgcaactgttgggaagggcgatcggtgcgggcctcttcgctattacgccagctggcgaaagggggatgtgctgcaaggcgattaagttgggtaacgccagggttttcccagtcacgacgttgtaaaacgacggccagtgaattcgttaagacccactttcacatttaagttgtttttctaatccgcatatgatcaattcaaggccgaataagaaggctggctctgcaccttggtgatcaaataattcgatagcttgtcgtaataatggcggcatactatcagtagtaggtgtttccctttcttctttagcgacttgatgctcttgatcttccaatacgcaacctaaagtaaaatgccccacagcgctgagtgcatataatgcattctctagtgaaaaaccttgttggcataaaaaggctaattgattttcgagagtttcatactgtttttctgtaggccgtgtacctaaatgtacttttgctccatcgcgatgacttagtaaagcacatctaaaacttttagcgttattacgtaaaaaatcttgccagctttccccttctaaagggcaaaagtgagtatggtgcctatctaacatctcaatggctaaggcgtcgagcaaagcccgcttattttttacatgccaatacaatgtaggctgctctacacctagcttctgggcgagtttacgggttgttaaaccttcgattccgacctcattaagcagctctaatgcgctgttaatcactttacttttatctaatctagacatcattaattcctaatttttgttgacactctatcattgatagagttattttaccactccctatcagtgatagagaaaagtga

SEQ ID NO: 25 - DNA, 5421 bp, Artificial Sequence
  Description of Artificial Sequence: Synthetic polynucleotide
gttgacactctatcattgatagagttattttaccactccctatcagtgatagagaaaagtgagcgaaaaatcaataaggaggcaacaagatgtgcgaaaaacatcttaatcatgctaaggaggttttctaatgaacatcttcaagaaaatggaggaatttaattatgaacaactggtctacttctacgacagcgaaacggaactcaaaggtattacctgtatacacaacacaactttagggccggcattgggcggtacccgcctttggaactataactctgaggaagatgccgttgaagacgtaatccgtctggctcggggcatgacttacaaagcggcttgcgccggtctgaatctgggcggcggtaaaaccgtgctgatcggtgatgctaaaaagattaaatcagagtcctacttccgtggactggggcgctacgttcagtcgctgaacggcagatatatcaccgcggaagacgtaaatacttctacgaaggatatggcatacgttgctatggaaactgactatgtggtaggcctgggaggtaaatccggcaaccctagtccagttactgcttacggtgcatttatgggtatcaaagcggcgctgatgaaaaaatttgaggatagctctattgaaggccgaaccttcgcagtgcagggtgctgggcagacgggttactatcttatcgattacctcctaggcaacaacaagttcaaagaaaaggctaaaaagatttacttcaccgaaattaacgagagctatatcgagcgtatgaacaaagaacatccggaagttgaatttatttccccggacaaaatctactcgctggaagtagacgtcttcgtgccctgcgccctgggcaaaatcgttaatgacaaaactatcgatgaatttaagtgtccgatcatcgcaggtactgcaaacaacgtactggaaagggaagcgcacggcaacatgcttaaagaacgtggcattctttacgccccggactatgtgatcaatgctggtgggctgatcaacgtttaccacgagctgaacggttacaataaagagaacgctattctggaagtggaattaatttatgatcgcctactggaaatattcaacatcgctgattctctgaacatcagcaccaatatcgctgccaacgagttcgcggaaaaacgtatcaagcaaattaagtccttgaaaaacaacttcattaaacgctaagtcaataaaggcatataaaaggaggttaataacatgaaagttaaagtaaaacatcttaatcatgcacaggagactttctaatgtcgacgacaaccgttggtgactacttgctgtatcgcttaaacgaaatcggcattgagcacctcttcggagtgccaggtgattacaatctgcaatttctggatcatgtaatcgaccaccctcagctgacttgggtcggctgcactaacgaacttaacgctgcctacgcagctgatggttatgcgcgttgtcgtccggctgcggcactgctgaccaccttcggggttggcgaactgagcgctattaatggcatcgcaggttcctacgcggagtatctgccggtaatacatatcgttggtgcaccgagtctatcagcccagcagcagggcgacctgattcaccactctcttggcgaaggtgatttttccagcttcctgaggatgtcccaaccggtgtctgttgcgcaggctgctctgactcctgataacgcatgcaaggaaatcgaccgcgtactggcggaagtcctcattcagcgtcgtcccggctacctgctgctgtctaccgacgtggctgctgcgccggcggctctgccacaaagcactctttctttgccgaccgccccggatcatcgcgcagttctggctgctttcagcgacgctgctgagcagatgctggctcaggccaaaagcgtctctctactggcggactttctggctgatcgtttcggtgttactcgagcactggccgcgtggcttcagcaggttccgctaccgcacgccactctgttaatgggtaaaggcgttctgagtgaacagcaaccagggttcgtgggtacctacgctggtgcggcatctatcgattcgacgcgtggcgcaatcgaagaagctggggtaattatcggagtgggagttagattttccgacactatcacagcaggcttctcgcagcagatcgacgcccgccgttttatagacattcaacccttcttctctcgtattggcgatcgccagtttgatcacttgccgatgcaggctgccgtcgcagccctgcatcaactgtgtcttcgttatcagcagcagtggtctatcaccgctcctagcccgcctgcactgccgccggctgctggtagcgagctgtcccagaacgcattctggcaggcgatgcagaacttcatccgccctggggacctgttggtggccgaccaaggtactgcggcgttcggcgcagcggcgctgcgcttaccgcagaattgccagctgcttgtgcagccgctgtggggctcaatcggttacagtctgccggccacctttggtgctcagacggcagatacagagcgtcgtgtaatcctaatcattggcgatggttcagcgcaattaactattcaggaactttccagtatgatgcgtgacggcttgaaacctatcatctttctcctgaacaacaacggttacaccgttgaacgggcgattcacggcgcggagcaacgttataacgatatcgctgcttggaattggacccaactgccccaggcgctgagtgttcattgcccagcgcagagctggcgagtcgttgaaacggtgcagctgaccgacgtaatgaaagtcatcgctgcttctccgcgtctgagcttggtagaagttgttctgcctgcaatggatgtcccaccgctgctgcaagcagtgagtgccgctctgaaccagcgcaactcctcttaagaccagaggtaaggaggtaacaaccatgcgagtgttgaagaaacatcttaatcatgcaggggagggtttctaatgcagacggcgttcttgtataagccaggtcacgaaaacttagtgcgctcggagatcccgatacctaaagctgggcgtggcgaagtcgttctggaaattaaagccgctggcatgtgccattccgatctgcacgttctcgacggtggaatccccctgccgggtcaatttgtaatgggccatgaaatcgttggtactattcacgagatcggccaggacgtgaccggtttcaaacagggcgatctgtacgcagtccacggcccgaatccgtgtggtatttgcaccctgtgcagagaaggatttgataacgactgcactacagtggcgaaaaccggtcaatggttcggactgggtcttgacggcggctaccagaagtatatccgtatcccgaacgtaaggtctatcgttaaagttccagaaggtgtttcagctgaggcagctgcgagctgtactgatgcagtactgaccccgtaccgtgcactaaaacaggctggcgccagcaactctactcgggtactgattctgggtctgggtggcttaggtctgaatgcccttaaactggctaagaccttcggcagttacgtttacgcatctgacctgaaaccttctgcgcgtgaagctgctaaggccgctggggcggatgaagtgctggagtccctgcccgaagacccgctgggtgttgatatcgtgttagacgtcgttggcgtgcagagcaccttcaacctcgctcaaaaacacgttggcccgcgtggcatcattgtacctgtaggcctggcatccccacagctttcgtttaacctaacggatctggcgctccgcgaaattcgtgttcagggcactttttggggcacgagcaatgagctggctgaatgtctgcgcctgtgccagctgggcctgatcaacccgaaatatactgtggtgcctcttgaagaagcgccgaaatatatggaagcaatggctcatgggaaagtagaaggtcgtatcgttttccacccgtaagaaggagatatacatatgacccatcaattaagatcgcgcgatatcatcgctctgggctttatgacatttgcgttgttcgtcggcgcaggtaacattattttccctccaatggtcggcttgcaggcaggcgaacacgtctggactgcggcattcggcttcctcattactgccgttggcctaccggtattaacggtagtggcgctggcaaaagttggcggcggtgttgacagtctcagcacgccaattggtaaagtcgctggcgtactgctggcaacagtttgttacctggcggtggggccgctttttgctacgccgcgtacagctaccgtttcttttgaagtgggcattgcgccgctgacgggtgattccgcgctgccgctgtttatttacagcctggtctatttcgctatcgttattctggtttcgctctatccgggcaagctgctggataccgtgggcaacttccttgcgccgctgaaaattatcgcgctggtcatcctgtctgttgccgcaattatctggccggcgggttctatcagtacggcgactgaggcttatcaaaacgctgcgttttctaacggcttcgtcaacggctatctgaccatggatacgctgggcgcaatggtgtttggtatcgttattgttaacgcggcgcgttctcgtggcgttaccgaagcgcgtctgctgacccgttataccgtctgggctggcctgatggcgggtgttggtctgactctgctgtacctggcgctgttccgtctgggttcagacagcgcgtcgctggtcgatcagtctgcaaacggtgcggcgatcctgcatgcttacgttcagcatacctttggcggcggcggtagcttcctgctggcggcgttaatcttcatcgcctgcctggtcacggcggttggcctgacctgtgcttgtgcagaattcttcgcccagtacgtaccgctctcttatcgtacgctggtgtttatcctcggcggcttctcgatggtggtgtctaacctcggcttgagccagctgattcagatctctgtaccggtgctgaccgccatttatccgccgtgtatcgcactggttgtattaagttttacacgctcatggtggcataattcgtcccgcgtgattgctccgccgatgtttatcagcctgctttttggtattctcgacgggatcaaggcatctgcattcagcgatatcttaccgtcctgggcgcagcgtttaccgctggccgaacaaggtctggcgtggttaatgccaacagtggtgatggtggttctggccattatctgggatcgtgcggcaggtcgtcaggtgacctccagcgctcactaatacgcatggcatggatgaccgatggtagtgtgggctctccccatgcgagagtagggaactgccaggcat

SEQ ID NO: 26 - DNA, 5478 bp, Artificial Sequence
  Description of Artificial Sequence: Synthetic polynucleotide
gttgacactctatcattgatagagttattttaccactccctatcagtgatagagaaaagtgagcgaaaaatcaataaggaggcaacaagatgtgcgaaaaacatcttaatcatgctaaggaggttttctaatgaacatcttcaagaaaatggaggaatttaattatgaacaactggtctacttctacgacagcgaaacggaactcaaaggtattacctgtatacacaacacaactttagggccggcattgggcggtacccgcctttggaactataactctgaggaagatgccgttgaagacgtaatccgtctggctcggggcatgacttacaaagcggcttgcgccggtctgaatctgggcggcggtaaaaccgtgctgatcggtgatgctaaaaagattaaatcagagtcctacttccgtggactggggcgctacgttcagtcgctgaacggcagatatatcaccgcggaagacgtaaatacttctacgaaggatatggcatacgttgctatggaaactgactatgtggtaggcctgggaggtaaatccggcaaccctagtccagttactgcttacggtgcatttatgggtatcaaagcggcgctgatgaaaaaatttgaggatagctctattgaaggccgaaccttcgcagtgcagggtgctgggcagacgggttactatcttatcgattacctcctaggcaacaacaagttcaaagaaaaggctaaaaagatttacttcaccgaaattaacgagagctatatcgagcgtatgaacaaagaacatccggaagttgaatttatttccccggacaaaatctactcgctggaagtagacgtcttcgtgccctgcgccctgggcaaaatcgttaatgacaaaactatcgatgaatttaagtgtccgatcatcgcaggtactgcaaacaacgtactggaaagggaagcgcacggcaacatgcttaaagaacgtggcattctttacgccccggactatgtgatcaatgctggtgggctgatcaacgtttaccacgagctgaacggttacaataaagagaacgctattctggaagtggaattaatttatgatcgcctactggaaatattcaacatcgctgattctctgaacatcagcaccaatatcgctgccaacgagttcgcggaaaaacgtatcaagcaaattaagtccttgaaaaacaacttcattaaacgctaagtcaataaaggcatataaaaggaggttaataacatgaaagttaaagtaaaacatcttaatcatgcacaggagactttctaatgtcgacgacaaccgttggtgactacttgctgtatcgcttaaacgaaatcggcattgagcacctcttcggagtgccaggtgattacaatctgcaatttctggatcatgtaatcgaccaccctcagctgacttgggtcggctgcactaacgaacttaacgctgcctacgcagctgatggttatgcgcgttgtcgtccggctgcggcactgctgaccaccttcggggttggcgaactgagcgctattaatggcatcgcaggttcctacgcggagtatctgccggtaatacatatcgttggtgcaccgagtctatcagcccagcagcagggcgacctgattcaccactctcttggcgaaggtgatttttccagcttcctgaggatgtcccaaccggtgtctgttgcgcaggctgctctgactcctgataacgcatgcaaggaaatcgaccgcgtactggcggaagtcctcattcagcgtcgtcccggctacctgctgctgtctaccgacgtggctgctgcgccggcggctctgccacaaagcactctttctttgccgaccgccccggatcatcgcgcagttctggctgctttcagcgacgctgctgagcagatgctggctcaggccaaaagcgtctctctactggcggactttctggctgatcgtttcggtgttactcgagcactggccgcgtggcttcagcaggttccgctaccgcacgccactctgttaatgggtaaaggcgttctgagtgaacagcaaccagggttcgtgggtacctacgctggtgcggcatctatcgattcgacgcgtggcgcaatcgaagaagctggggtaattatcggagtgggagttagattttccgacactatcacagcaggcttctcgcagcagatcgacgcccgccgttttatagacattcaacccttcttctctcgtattggcgatcgccagtttgatcacttgccgatgcaggctgccgtcgcagccctgcatcaactgtgtcttcgttatcagcagcagtggtctatcaccgctcctagcccgcctgcactgccgccggctgctggtagcgagctgtcccagaacgcattctggcaggcgatgcagaacttcatccgccctggggacctgttggtggccgaccaaggtactgcggcgttcggcgcagcggcgctgcgcttaccgcagaattgccagctgcttgtgcagccgctgtggggctcaatcggttacagtctgccggccacctttggtgctcagacggcagatacagagcgtcgtgtaatcctaatcattggcgatggttcagcgcaattaactattcaggaactttccagtatgatgcgtgacggcttgaaacctatcatctttctcctgaacaacaacggttacaccgttgaacgggcgattcacggcgcggagcaacgttataacgatatcgctgcttggaattggacccaactgccccaggcgctgagtgttcattgcccagcgcagagctggcgagtcgttgaaacggtgcagctgaccgacgtaatgaaagtcatcgctgcttctccgcgtctgagcttggtagaagttgttctgcctgcaatggatgtcccaccgctgctgcaagcagtgagtgccgctctgaaccagcgcaactcctcttaagaccagaggtaaggaggtaacaaccatgcgagtgttgaagaaacatcttaatcatgcaggggagggtttctaatgcgcagcatgcagtttgatgagtacggtgcacccctgaaagcgttctcatatgaagacccgaccccgcaagggaaggaagtagtcgttaggatcgaagcctgtggtgtgtgccactctgatattcatcttcacgagggctacttcgacatgggcggtggcaataaagctgatgttactcgtgctcgcgaactcccttttacattgggtcatgaaatcgttggcgaagtggtagcaactggaccaggtgtcaccggcgctaaaccgggcgacaaacgtattgtgtacccgtggatcgggtgcggcgactgcccgaaatgcaacagtggtgaggatcagtcctgtgcgcgtccacgtaacctgggtgttcacgttgacggtggctattcgacgcacgtaaagataccggacgaaaaattcctgttcgcctacgatggtattcctactgagttagcgggaacctatgcttgcagcggcatcaccgcttatggtgcactgatgaaagcaaaggaagcggctgaaagatctggctacatcggtctgattggcgctggtggcgttggcatggctggtctgatgctggccaaagcagcgatcggggctaaaactgtagtctttgatatcgacgacgcaaaactggaagctgcgacccgtgccggggcggattacgtgttcaactccggtgcaaaagaaacacgcaaggaagttatgaaactaacgaatggtggcctgtctggtgctgttgatttcgttggcagcgataaaagcgctctgtttggaatcaacgccttgggtcagaacggcgtgctggtcataattggactgttcggtggcgctatgactgttccggtacccctgttcccgctgaaagggatcaccgtacgtggctcatacgtaggttccctgcaagagatgagtgatatgatggagttagttcgcgctgggaaagttcctccgatgccggtaaaaactcggccactggacgctgcctgggaaacccttgaggatctacgccatggtaaaatcgtgggccgtgttgttctgaccccataagaaggagatatacatatgacccatcaattaagatcgcgcgatatcatcgctctgggctttatgacatttgcgttgttcgtcggcgcaggtaacattattttccctccaatggtcggcttgcaggcaggcgaacacgtctggactgcggcattcggcttcctcattactgccgttggcctaccggtattaacggtagtggcgctggcaaaagttggcggcggtgttgacagtctcagcacgccaattggtaaagtcgctggcgtactgctggcaacagtttgttacctggcggtggggccgctttttgctacgccgcgtacagctaccgtttcttttgaagtgggcattgcgccgctgacgggtgattccgcgctgccgctgtttatttacagcctggtctatttcgctatcgttattctggtttcgctctatccgggcaagctgctggataccgtgggcaacttccttgcgccgctgaaaattatcgcgctggtcatcctgtctgttgccgcaattatctggccggcgggttctatcagtacggcgactgaggcttatcaaaacgctgcgttttctaacggcttcgtcaacggctatctgaccatggatacgctgggcgcaatggtgtttggtatcgttattgttaacgcggcgcgttctcgtggcgttaccgaagcgcgtctgctgacccgttataccgtctgggctggcctgatggcgggtgttggtctgactctgctgtacctggcgctgttccgtctgggttcagacagcgcgtcgctggtcgatcagtctgcaaacggtgcggcgatcctgcatgcttacgttcagcatacctttggcggcggcggtagcttcctgctggcggcgttaatcttcatcgcctgcctggtcacggcggttggcctgacctgtgcttgtgcagaattcttcgcccagtacgtaccgctctcttatcgtacgctggtgtttatcctcggcggcttctcgatggtggtgtctaacctcggcttgagccagctgattcagatctctgtaccggtgctgaccgccatttatccgccgtgtatcgcactggttgtattaagttttacacgctcatggtggcataattcgtcccgcgtgattgctccgccgatgtttatcagcctgctttttggtattctcgacgggatcaaggcatctgcattcagcgatatcttaccgtcctgggcgcagcgtttaccgctggccgaacaaggtctggcgtggttaatgccaacagtggtgatggtggttctggccattatctgggatcgtgcggcaggtcgtcaggtgacctccagcgctcactaatacgcatggcatggatgaccgatggtagtgtgggctctccccatgcgagagtagggaactgccaggcat

SEQ ID NO: 27 - DNA, 5508 bp, Artificial Sequence
  Description of Artificial Sequence: Synthetic polynucleotide
gttgacactctatcattgatagagttattttaccactccctatcagtgatagagaaaagtgagcgaaaaatcaataaggaggcaacaagatgtgcgaaaaacatcttaatcatgctaaggaggttttctaatgaacatcttcaagaaaatggaggaatttaattatgaacaactggtctacttctacgacagcgaaacggaactcaaaggtattacctgtatacacaacacaactttagggccggcattgggcggtacccgcctttggaactataactctgaggaagatgccgttgaagacgtaatccgtctggctcggggcatgacttacaaagcggcttgcgccggtctgaatctgggcggcggtaaaaccgtgctgatcggtgatgctaaaaagattaaatcagagtcctacttccgtggactggggcgctacgttcagtcgctgaacggcagatatatcaccgcggaagacgtaaatacttctacgaaggatatggcatacgttgctatggaaactgactatgtggtaggcctgggaggtaaatccggcaaccctagtccagttactgcttacggtgcatttatgggtatcaaagcggcgctgatgaaaaaatttgaggatagctctattgaaggccgaaccttcgcagtgcagggtgctgggcagacgggttactatcttatcgattacctcctaggcaacaacaagttcaaagaaaaggctaaaaagatttacttcaccgaaattaacgagagctatatcgagcgtatgaacaaagaacatccggaagttgaatttatttccccggacaaaatctactcgctggaagtagacgtcttcgtgccctgcgccctgggcaaaatcgttaatgacaaaactatcgatgaatttaagtgtccgatcatcgcaggtactgcaaacaacgtactggaaagggaagcgcacggcaacatgcttaaagaacgtggcattctttacgccccggactatgtgatcaatgctggtgggctgatcaacgtttaccacgagctgaacggttacaataaagagaacgctattctggaagtggaattaatttatgatcgcctactggaaatattcaacatcgctgattctctgaacatcagcaccaatatcgctgccaacgagttcgcggaaaaacgtatcaagcaaattaagtccttgaaaaacaacttcattaaacgctaagtcaataaaggcatataaaaggaggttaataacatgaaagttaaagtaaaacatcttaatcatgcacaggagactttctaatgtcgacgacaaccgttggtgactacttgctgtatcgcttaaacgaaatcggcattgagcacctcttcggagtgccaggtgattacaatctgcaatttctggatcatgtaatcgaccaccctcagctgacttgggtcggctgcactaacgaacttaacgctgcctacgcagctgatggttatgcgcgttgtcgtccggctgcggcactgctgaccaccttcggggttggcgaactgagcgctattaatggcatcgcaggttcctacgcggagtatctgccggtaatacatatcgttggtgcaccgagtctatcagcccagcagcagggcgacctgattcaccactctcttggcgaaggtgatttttccagcttcctgaggatgtcccaaccggtgtctgttgcgcaggctgctctgactcctgataacgcatgcaaggaaatcgaccgcgtactggcggaagtcctcattcagcgtcgtcccggctacctgctgctgtctaccgacgtggctgctgcgccggcggctctgccacaaagcactctttctttgccgaccgccccggatcatcgcgcagttctggctgctttcagcgacgctgctgagcagatgctggctcaggccaaaagcgtctctctactggcggactttctggctgatcgtttcggtgttactcgagcactggccgcgtggcttcagcaggttccgctaccgcacgccactctgttaatgggtaaaggcgttctgagtgaacagcaaccagggttcgtgggtacctacgctggtgcggcatctatcgattcgacgcgtggcgcaatcgaagaagctggggtaattatcggagtgggagttagattttccgacactatcacagcaggcttctcgcagcagatcgacgcccgccgttttatagacattcaacccttcttctctcgtattggcgatcgccagtttgatcacttgccgatgcaggctgccgtcgcagccctgcatcaactgtgtcttcgttatcagcagcagtggtctatcaccgctcctagcccgcctgcactgccgccggctgctggtagcgagctgtcccagaacgcattctggcaggcgatgcagaacttcatccgccctggggacctgttggtggccgaccaaggtactgcggcgttcggcgcagcggcgctgcgcttaccgcagaattgccagctgcttgtgcagccgctgtggggctcaatcggttacagtctgccggccacctttggtgctcagacggcagatacagagcgtcgtgtaatcctaatcattggcgatggttcagcgcaattaactattcaggaactttccagtatgatgcgtgacggcttgaaacctatcatctttctcctgaacaacaacggttacaccgttgaacgggcgattcacggcgcggagcaacgttataacgatatcgctgcttggaattggacccaactgccccaggcgctgagtgttcattgcccagcgcagagctggcgagtcgttgaaacggtgcagctgaccgacgtaatgaaagtcatcgctgcttctccgcgtctgagcttggtagaagttgttctgcctgcaatggatgtcccaccgctgctgcaagcagtgagtgccgctctgaaccagcgcaactcctcttaagaccagaggtaaggaggtaacaaccatgcgagtgttgaagaaacatcttaatcatgcaggggagggtttctaatgacagcggagcagcaaaatggggtatccgactcacgccgtttcgaatttcaggaatttggtggccctatcgccccacagacctatcagctccccgcaccggctagcgatgaagttttgttaaaggtgaactactgcggtgtctgtcacagtgatgttcatcttcacgacggctacttcgagctgggtggcgataaacgtctgaacttcgctatgccgctgccgctgacgctgggtcacgaagtaattggcaccgttgtggctgtcggcgaccaggttactggtgtaaaaccgggggaccagcgactgatctatccgtggataggttgcggaaaatgcggcgcgtgtcaaaaaggagaagaaaacctgtgcgttactcctgcacatctgggcgtgaacaagccgggcggttacgctgatcacatcgttgtaccccattctcgctaccttctggacatttcgggtctgaacccgggtgatgccgctaccctcgcgtgctccggcctgaccactttcagcgcgatcaacaaagtgttgccgcttgcagatgaccagtggattgttgttatcggttgtggtggcctcggccagatggcgctgcgtatcctgcaagctatgggaattggcaatgttatcggtattgacctgtctgaagagaaacggaaactggctcatgaaagcggtgcacgtcactccttcgatccaaacactccgaagctgaaccgcgtggtcgccgaaacctgcccgggtacggtacaggccgcgttagactttgtgggcaatgagcaaactgctcagctggcactgtctctgcttggaaaaggtggcaaatatgttcctgtcgggctgcacggcggcgagctgcgttacccattgccgatcatcacgaacaaagctgtaagtatcatcggttcttacgttggtaccctgaaagaactggaagacttagttgctttcgccaaggaaaagaatctgccgccaattcatattgaacaccgcccgctggaatcggcggctcaggccgtagaggacctggaaaaaggacaggttgctgggcgtgttatcctggatgcaggtaactaagaaggagatatacatatgacccatcaattaagatcgcgcgatatcatcgctctgggctttatgacatttgcgttgttcgtcggcgcaggtaacattattttccctccaatggtcggcttgcaggcaggcgaacacgtctggactgcggcattcggcttcctcattactgccgttggcctaccggtattaacggtagtggcgctggcaaaagttggcggcggtgttgacagtctcagcacgccaattggtaaagtcgctggcgtactgctggcaacagtttgttacctggcggtggggccgctttttgctacgccgcgtacagctaccgtttcttttgaagtgggcattgcgccgctgacgggtgattccgcgctgccgctgtttatttacagcctggtctatttcgctatcgttattctggtttcgctctatccgggcaagctgctggataccgtgggcaacttccttgcgccgctgaaaattatcgcgctggtcatcctgtctgttgccgcaattatctggccggcgggttctatcagtacggcgactgaggcttatcaaaacgctgcgttttctaacggcttcgtcaacggctatctgaccatggatacgctgggcgcaatggtgtttggtatcgttattgttaacgcggcgcgttctcgtggcgttaccgaagcgcgtctgctgacccgttataccgtctgggctggcctgatggcgggtgttggtctgactctgctgtacctggcgctgttccgtctgggttcagacagcgcgtcgctggtcgatcagtctgcaaacggtgcggcgatcctgcatgcttacgttcagcatacctttggcggcggcggtagcttcctgctggcggcgttaatcttcatcgcctgcctggtcacggcggttggcctgacctgtgcttgtgcagaattcttcgcccagtacgtaccgctctcttatcgtacgctggtgtttatcctcggcggcttctcgatggtggtgtctaacctcggcttgagccagctgattcagatctctgtaccggtgctgaccgccatttatccgccgtgtatcgcactggttgtattaagttttacacgctcatggtggcataattcgtcccgcgtgattgctccgccgatgtttatcagcctgctttttggtattctcgacgggatcaaggcatctgcattcagcgatatcttaccgtcctgggcgcagcgtttaccgctggccgaacaaggtctggcgtggttaatgccaacagtggtgatggtggttctggccattatctgggatcgtgcggcaggtcgtcaggtgacctccagcgctcactaatacgcatggcatggatgaccgatggtagtgtgggctctccccatgcgagagtagggaactgccaggcat

SEQ ID NO: 28 - DNA, 5430 bp, Artificial Sequence
  Description of Artificial Sequence: Synthetic polynucleotide
gttgacactctatcattgatagagttattttaccactccctatcagtgatagagaaaagtgagcgaaaaatcaataaggaggcaacaagatgtgcgaaaaacatcttaatcatgctaaggaggttttctaatggtagagatccaggctttgccggaaacttccatttttgggcaaatcgcagaccaccagcatgaacaggtggtcttctgccacgatcacgaaaccggcctccgtgcgataatcggtattcataacacggttcttggccccgccttaggtggaactcgcatgtggcactatgctaccgaggcagaagcgctgaatgacgttctgcgtctgtctcgcggtatgacctacaaggctgctatctcgggcctgaacctgggtggcggtaaagcagtaatcattggggatgccaaaacaatcaaaaccgaagcgctgctgcggaaattcggcagattcgtgcagaacctgaatggtaaatacatcactgctgaagacgttaacatgactacaaaggatatggagtacattaggatggaaaccaaacacgtcgctggcttacctgaaagtatgggtggaagcggtgacccgtcaccggtaactgcatatggtacgtacatgggcatgaaagcggcggccaaaaaggcgtttggctctgattccctggctggcaaacgtatcgctgttcaaggtgtgggtcatgttggcacttatctgcttgagcatttgaccaaagaaggtgctcagattgtgctgactgactactataaggaacgtgccgaggaagcaggcgcgcgttttggcgcacaggttgttggcctggacgatatctacgatcaagaggtcgacatttactctccatgtgctctcggtgctaccatcaacgatgacactatcgatcgcctgcgttgcgctgttgtagccggttgcgcaaacaaccagctgaaagaagaaaacgtccacggtccggcgctggttgagcgcgggatagtatacgccccagacttcctgatcaatgcagggggcctgattaacgtgtatagcgaagttacagggtctacccgtcagggggctttaactcagaccgaaaaaatctatgactacacactccaagttctggaaaaagccgcggctgaaggtctgcacccgcagcaggctgcgatccgtcaggcggaacaacgcatcgctgcaattggtaaggtgaaaagcacctactaagtcaataaaggcatataaaaggaggttaataacatgaaagttaaagtaaaacatcttaatcatgcacaggagactttctaatgtcgacgacaaccgttggtgactacttgctgtatcgcttaaacgaaatcggcattgagcacctcttcggagtgccaggtgattacaatctgcaatttctggatcatgtaatcgaccaccctcagctgacttgggtcggctgcactaacgaacttaacgctgcctacgcagctgatggttatgcgcgttgtcgtccggctgcggcactgctgaccaccttcggggttggcgaactgagcgctattaatggcatcgcaggttcctacgcggagtatctgccggtaatacatatcgttggtgcaccgagtctatcagcccagcagcagggcgacctgattcaccactctcttggcgaaggtgatttttccagcttcctgaggatgtcccaaccggtgtctgttgcgcaggctgctctgactcctgataacgcatgcaaggaaatcgaccgcgtactggcggaagtcctcattcagcgtcgtcccggctacctgctgctgtctaccgacgtggctgctgcgccggcggctctgccacaaagcactctttctttgccgaccgccccggatcatcgcgcagttctggctgctttcagcgacgctgctgagcagatgctggctcaggccaaaagcgtctctctactggcggactttctggctgatcgtttcggtgttactcgagcactggccgcgtggcttcagcaggttccgctaccgcacgccactctgttaatgggtaaaggcgttctgagtgaacagcaaccagggttcgtgggtacctacgctggtgcggcatctatcgattcgacgcgtggcgcaatcgaagaagctggggtaattatcggagtgggagttagattttccgacactatcacagcaggcttctcgcagcagatcgacgcccgccgttttatagacattcaacccttcttctctcgtattggcgatcgccagtttgatcacttgccgatgcaggctgccgtcgcagccctgcatcaactgtgtcttcgttatcagcagcagtggtctatcaccgctcctagcccgcctgcactgccgccggctgctggtagcgagctgtcccagaacgcattctggcaggcgatgcagaacttcatccgccctggggacctgttggtggccgaccaaggtactgcggcgttcggcgcagcggcgctgcgcttaccgcagaattgccagctgcttgtgcagccgctgtggggctcaatcggttacagtctgccggccacctttggtgctcagacggcagatacagagcgtcgtgtaatcctaatcattggcgatggttcagcgcaattaactattcaggaactttccagtatgatgcgtgacggcttgaaacctatcatctttctcctgaacaacaacggttacaccgttgaacgggcgattcacggcgcggagcaacgttataacgatatcgctgcttggaattggacccaactgccccaggcgctgagtgttcattgcccagcgcagagctggcgagtcgttgaaacggtgcagctgaccgacgtaatgaaagtcatcgctgcttctccgcgtctgagcttggtagaagttgttctgcctgcaatggatgtcccaccgctgctgcaagcagtgagtgccgctctgaaccagcgcaactcctcttaagaccagaggtaaggaggtaacaaccatgcgagtgttgaagaaacatcttaatcatgcaggggagggtttctaatgcagacggcgttcttgtataagccaggtcacgaaaacttagtgcgctcggagatcccgatacctaaagctgggcgtggcgaagtcgttctggaaattaaagccgctggcatgtgccattccgatctgcacgttctcgacggtggaatccccctgccgggtcaatttgtaatgggccatgaaatcgttggtactattcacgagatcggccaggacgtgaccggtttcaaacagggcgatctgtacgcagtccacggcccgaatccgtgtggtatttgcaccctgtgcagagaaggatttgataacgactgcactacagtggcgaaaaccggtcaatggttcggactgggtcttgacggcggctaccagaagtatatccgtatcccgaacgtaaggtctatcgttaaagttccagaaggtgtttcagctgaggcagctgcgagctgtactgatgcagtactgaccccgtaccgtgcactaaaacaggctggcgccagcaactctactcgggtactgattctgggtctgggtggcttaggtctgaatgcccttaaactggctaagaccttcggcagttacgtttacgcatctgacctgaaaccttctgcgcgtgaagctgctaaggccgctggggcggatgaagtgctggagtccctgcccgaagacccgctgggtgttgatatcgtgttagacgtcgttggcgtgcagagcaccttcaacctcgctcaaaaacacgttggcccgcgtggcatcattgtacctgtaggcctggcatccccacagctttcgtttaacctaacggatctggcgctccgcgaaattcgtgttcagggcactttttggggcacgagcaatgagctggctgaatgtctgcgcctgtgccagctgggcctgatcaacccgaaatatactgtggtgcctcttgaagaagcgccgaaatatatggaagcaatggctcatgggaaagtagaaggtcgtatcgttttccacccgtaagaaggagatatacatatgacccatcaattaagatcgcgcgatatcatcgctctgggctttatgacatttgcgttgttcgtcggcgcaggtaacattattttccctccaatggtcggcttgcaggcaggcgaacacgtctggactgcggcattcggcttcctcattactgccgttggcctaccggtattaacggtagtggcgctggcaaaagttggcggcggtgttgacagtctcagcacgccaattggtaaagtcgctggcgtactgctggcaacagtttgttacctggcggtggggccgctttttgctacgccgcgtacagctaccgtttcttttgaagtgggcattgcgccgctgacgggtgattccgcgctgccgctgtttatttacagcctggtctatttcgctatcgttattctggtttcgctctatccgggcaagctgctggataccgtgggcaacttccttgcgccgctgaaaattatcgcgctggtcatcctgtctgttgccgcaattatctggccggcgggttctatcagtacggcgactgaggcttatcaaaacgctgcgttttctaacggcttcgtcaacggctatctgaccatggatacgctgggcgcaatggtgtttggtatcgttattgttaacgcggcgcgttctcgtggcgttaccgaagcgcgtctgctgacccgttataccgtctgggctggcctgatggcgggtgttggtctgactctgctgtacctggcgctgttccgtctgggttcagacagcgcgtcgctggtcgatcagtctgcaaacggtgcggcgatcctgcatgcttacgttcagcatacctttggcggcggcggtagcttcctgctggcggcgttaatcttcatcgcctgcctggtcacggcggttggcctgacctgtgcttgtgcagaattcttcgcccagtacgtaccgctctcttatcgtacgctggtgtttatcctcggcggcttctcgatggtggtgtctaacctcggcttgagccagctgattcagatctctgtaccggtgctgaccgccatttatccgccgtgtatcgcactggttgtattaagttttacacgctcatggtggcataattcgtcccgcgtgattgctccgccgatgtttatcagcctgctttttggtattctcgacgggatcaaggcatctgcattcagcgatatcttaccgtcctgggcgcagcgtttaccgctggccgaacaaggtctggcgtggttaatgccaacagtggtgatggtggttctggccattatctgggatcgtgcggcaggtcgtcaggtgacctccagcgctcactaatacgcatggcatggatgaccgatggtagtgtgggctctccccatgcgagagtagggaactgccaggcat

SEQ ID NO: 29 - DNA, 5487 bp, Artificial Sequence
  Description of Artificial Sequence: Synthetic polynucleotide
gttgacactctatcattgatagagttattttaccactccctatcagtgatagagaaaagtgagcgaaaaatcaataaggaggcaacaagatgtgcgaaaaacatcttaatcatgctaaggaggttttctaatggtagagatccaggctttgccggaaacttccatttttgggcaaatcgcagaccaccagcatgaacaggtggtcttctgccacgatcacgaaaccggcctccgtgcgataatcggtattcataacacggttcttggccccgccttaggtggaactcgcatgtggcactatgctaccgaggcagaagcgctgaatgacgttctgcgtctgtctcgcggtatgacctacaaggctgctatctcgggcctgaacctgggtggcggtaaagcagtaatcattggggatgccaaaacaatcaaaaccgaagcgctgctgcggaaattcggcagattcgtgcagaacctgaatggtaaatacatcactgctgaagacgttaacatgactacaaaggatatggagtacattaggatggaaaccaaacacgtcgctggcttacctgaaagtatgggtggaagcggtgacccgtcaccggtaactgcatatggtacgtacatgggcatgaaagcggcggccaaaaaggcgtttggctctgattccctggctggcaaacgtatcgctgttcaaggtgtgggtcatgttggcacttatctgcttgagcatttgaccaaagaaggtgctcagattgtgctgactgactactataaggaacgtgccgaggaagcaggcgcgcgttttggcgcacaggttgttggcctggacgatatctacgatcaagaggtcgacatttactctccatgtgctctcggtgctaccatcaacgatgacactatcgatcgcctgcgttgcgctgttgtagccggttgcgcaaacaaccagctgaaagaagaaaacgtccacggtccggcgctggttgagcgcgggatagtatacgccccagacttcctgatcaatgcagggggcctgattaacgtgtatagcgaagttacagggtctacccgtcagggggctttaactcagaccgaaaaaatctatgactacacactccaagttctggaaaaagccgcggctgaaggtctgcacccgcagcaggctgcgatccgtcaggcggaacaacgcatcgctgcaattggtaaggtgaaaagcacctactaagtcaataaaggcatataaaaggaggttaataacatgaaagttaaagtaaaacatcttaatcatgcacaggagactttctaatgtcgacgacaaccgttggtgactacttgctgtatcgcttaaacgaaatcggcattgagcacctcttcggagtgccaggtgattacaatctgcaatttctggatcatgtaatcgaccaccctcagctgacttgggtcggctgcactaacgaacttaacgctgcctacgcagctgatggttatgcgcgttgtcgtccggctgcggcactgctgaccaccttcggggttggcgaactgagcgctattaatggcatcgcaggttcctacgcggagtatctgccggtaatacatatcgttggtgcaccgagtctatcagcccagcagcagggcgacctgattcaccactctcttggcgaaggtgatttttccagcttcctgaggatgtcccaaccggtgtctgttgcgcaggctgctctgactcctgataacgcatgcaaggaaatcgaccgcgtactggcggaagtcctcattcagcgtcgtcccggctacctgctgctgtctaccgacgtggctgctgcgccggcggctctgccacaaagcactctttctttgccgaccgccccggatcatcgcgcagttctggctgctttcagcgacgctgctgagcagatgctggctcaggccaaaagcgtctctctactggcggactttctggctgatcgtttcggtgttactcgagcactggccgcgtggcttcagcaggttccgctaccgcacgccactctgttaatgggtaaaggcgttctgagtgaacagcaaccagggttcgtgggtacctacgctggtgcggcatctatcgattcgacgcgtggcgcaatcgaagaagctggggtaattatcggagtgggagttagattttccgacactatcacagcaggcttctcgcagcagatcgacgcccgccgttttatagacattcaacccttcttctctcgtattggcgatcgccagtttgatcacttgccgatgcaggctgccgtcgcagccctgcatcaactgtgtcttcgttatcagcagcagtggtctatcaccgctcctagcccgcctgcactgccgccggctgctggtagcgagctgtcccagaacgcattctggcaggcgatgcagaacttcatccgccctggggacctgttggtggccgaccaaggtactgcggcgttcggcgcagcggcgctgcgcttaccgcagaattgccagctgcttgtgcagccgctgtggggctcaatcggttacagtctgccggccacctttggtgctcagacggcagatacagagcgtcgtgtaatcctaatcattggcgatggttcagcgcaattaactattcaggaactttccagtatgatgcgtgacggcttgaaacctatcatctttctcctgaacaacaacggttacaccgttgaacgggcgattcacggcgcggagcaacgttataacgatatcgctgcttggaattggacccaactgccccaggcgctgagtgttcattgcccagcgcagagctggcgagtcgttgaaacggtgcagctgaccgacgtaatgaaagtcatcgctgcttctccgcgtctgagcttggtagaagttgttctgcctgcaatggatgtcccaccgctgctgcaagcagtgagtgccgctctgaaccagcgcaactcctcttaagaccagaggtaaggaggtaacaaccatgcgagtgttgaagaaacatcttaatcatgcaggggagggtttctaatgcgcagcatgcagtttgatgagtacggtgcacccctgaaagcgttctcatatgaagacccgaccccgcaagggaaggaagtagtcgttaggatcgaagcctgtggtgtgtgccactctgatattcatcttcacgagggctacttcgacatgggcggtggcaataaagctgatgttactcgtgctcgcgaactcccttttacattgggtcatgaaatcgttggcgaagtggtagcaactggaccaggtgtcaccggcgctaaaccgggcgacaaacgtattgtgtacccgtggatcgggtgcggcgactgcccgaaatgcaacagtggtgaggatcagtcctgtgcgcgtccacgtaacctgggtgttcacgttgacggtggctattcgacgcacgtaaagataccggacgaaaaattcctgttcgcctacgatggtattcctactgagttagcgggaacctatgcttgcagcggcatcaccgcttatggtgcactgatgaaagcaaaggaagcggctgaaagatctggctacatcggtctgattggcgctggtggcgttggcatggctggtctgatgctggccaaagcagcgatcggggctaaaactgtagtctttgatatcgacgacgcaaaactggaagctgcgacccgtgccggggcggattacgtgttcaactccggtgcaaaagaaacacgcaaggaagttatgaaactaacgaatggtggcctgtctggtgctgttgatttcgttggcagcgataaaagcgctctgtttggaatcaacgccttgggtcagaacggcgtgctggtcataattggactgttcggtggcgctatgactgttccggtacccctgttcccgctgaaagggatcaccgtacgtggctcatacgtaggttccctgcaagagatgagtgatatgatggagttagttcgcgctgggaaagttcctccgatgccggtaaaaactcggccactggacgctgcctgggaaacccttgaggatctacgccatggtaaaatcgtgggccgtgttgttctgaccccataagaaggagatatacatatgacccatcaattaagatcgcgcgatatcatcgctctgggctttatgacatttgcgttgttcgtcggcgcaggtaacattattttccctccaatggtcggcttgcaggcaggcgaacacgtctggactgcggcattcggcttcctcattactgccgttggcctaccggtattaacggtagtggcgctggcaaaagttggcggcggtgttgacagtctcagcacgccaattggtaaagtcgctggcgtactgctggcaacagtttgttacctggcggtggggccgctttttgctacgccgcgtacagctaccgtttcttttgaagtgggcattgcgccgctgacgggtgattccgcgctgccgctgtttatttacagcctggtctatttcgctatcgttattctggtttcgctctatccgggcaagctgctggataccgtgggcaacttccttgcgccgctgaaaattatcgcgctggtcatcctgtctgttgccgcaattatctggccggcgggttctatcagtacggcgactgaggcttatcaaaacgctgcgttttctaacggcttcgtcaacggctatctgaccatggatacgctgggcgcaatggtgtttggtatcgttattgttaacgcggcgcgttctcgtggcgttaccgaagcgcgtctgctgacccgttataccgtctgggctggcctgatggcgggtgttggtctgactctgctgtacctggcgctgttccgtctgggttcagacagcgcgtcgctggtcgatcagtctgcaaacggtgcggcgatcctgcatgcttacgttcagcatacctttggcggcggcggtagcttcctgctggcggcgttaatcttcatcgcctgcctggtcacggcggttggcctgacctgtgcttgtgcagaattcttcgcccagtacgtaccgctctcttatcgtacgctggtgtttatcctcggcggcttctcgatggtggtgtctaacctcggcttgagccagctgattcagatctctgtaccggtgctgaccgccatttatccgccgtgtatcgcactggttgtattaagttttacacgctcatggtggcataattcgtcccgcgtgattgctccgccgatgtttatcagcctgctttttggtattctcgacgggatcaaggcatctgcattcagcgatatcttaccgtcctgggcgcagcgtttaccgctggccgaacaaggtctggcgtggttaatgccaacagtggtgatggtggttctggccattatctgggatcgtgcggcaggtcgtcaggtgacctccagcgctcactaatacgcatggcatggatgaccgatggtagtgtgggctctccccatgcgagagtagggaactgccaggcat

SEQ ID NO: 30 - DNA, 5517 bp, Artificial Sequence
  Description of Artificial Sequence: Synthetic polynucleotide
gttgacactctatcattgatagagttattttaccactccctatcagtgatagagaaaagtgagcgaaaaatcaataaggaggcaacaagatgtgcgaaaaacatcttaatcatgctaaggaggttttctaatggtagagatccaggctttgccggaaacttccatttttgggcaaatcgcagaccaccagcatgaacaggtggtcttctgccacgatcacgaaaccggcctccgtgcgataatcggtattcataacacggttcttggccccgccttaggtggaactcgcatgtggcactatgctaccgaggcagaagcgctgaatgacgttctgcgtctgtctcgcggtatgacctacaaggctgctatctcgggcctgaacctgggtggcggtaaagcagtaatcattggggatgccaaaacaatcaaaaccgaagcgctgctgcggaaattcggcagattcgtgcagaacctgaatggtaaatacatcactgctgaagacgttaacatgactacaaaggatatggagtacattaggatggaaaccaaacacgtcgctggcttacctgaaagtatgggtggaagcggtgacccgtcaccggtaactgcatatggtacgtacatgggcatgaaagcggcggccaaaaaggcgtttggctctgattccctggctggcaaacgtatcgctgttcaaggtgtgggtcatgttggcacttatctgcttgagcatttgaccaaagaaggtgctcagattgtgctgactgactactataaggaacgtgccgaggaagcaggcgcgcgttttggcgcacaggttgttggcctggacgatatctacgatcaagaggtcgacatttactctccatgtgctctcggtgctaccatcaacgatgacactatcgatcgcctgcgttgcgctgttgtagccggttgcgcaaacaaccagctgaaagaagaaaacgtccacggtccggcgctggttgagcgcgggatagtatacgccccagacttcctgatcaatgcagggggcctgattaacgtgtatagcgaagttacagggtctacccgtcagggggctttaactcagaccgaaaaaatctatgactacacactccaagttctggaaaaagccgcggctgaaggtctgcacccgcagcaggctgcgatccgtcaggcggaacaacgcatcgctgcaattggtaaggtgaaaagcacctactaagtcaataaaggcatataaaaggaggttaataacatgaaagttaaagtaaaacatcttaatcatgcacaggagactttctaatgtcgacgacaaccgttggtgactacttgctgtatcgcttaaacgaaatcggcattgagcacctcttcggagtgccaggtgattacaatctgcaatttctggatcatgtaatcgaccaccctcagctgacttgggtcggctgcactaacgaacttaacgctgcctacgcagctgatggttatgcgcgttgtcgtccggctgcggcactgctgaccaccttcggggttggcgaactgagcgctattaatggcatcgcaggttcctacgcggagtatctgccggtaatacatatcgttggtgcaccgagtctatcagcccagcagcagggcgacctgattcaccactctcttggcgaaggtgatttttccagcttcctgaggatgtcccaaccggtgtctgttgcgcaggctgctctgactcctgataacgcatgcaaggaaatcgaccgcgtactggcggaagtcctcattcagcgtcgtcccggctacctgctgctgtctaccgacgtggctgctgcgccggcggctctgccacaaagcactctttctttgccgaccgccccggatcatcgcgcagttctggctgctttcagcgacgctgctgagcagatgctggctcaggccaaaagcgtctctctactggcggactttctggctgatcgtttcggtgttactcgagcactggccgcgtggcttcagcaggttccgctaccgcacgccactctgttaatgggtaaaggcgttctgagtgaacagcaaccagggttcgtgggtacctacgctggtgcggcatctatcgattcgacgcgtggcgcaatcgaagaagctggggtaattatcggagtgggagttagattttccgacactatcacagcaggcttctcgcagcagatcgacgcccgccgttttatagacattcaacccttcttctctcgtattggcgatcgccagtttgatcacttgccgatgcaggctgccgtcgcagccctgcatcaactgtgtcttcgttatcagcagcagtggtctatcaccgctcctagcccgcctgcactgccgccggctgctggtagcgagctgtcccagaacgcattctggcaggcgatgcagaacttcatccgccctggggacctgttggtggccgaccaaggtactgcggcgttcggcgcagcggcgctgcgcttaccgcagaattgccagctgcttgtgcagccgctgtggggctcaatcggttacagtctgccggccacctttggtgctcagacggcagatacagagcgtcgtgtaatcctaatcattggcgatggttcagcgcaattaactattcaggaactttccagtatgatgcgtgacggcttgaaacctatcatctttctcctgaacaacaacggttacaccgttgaacgggcgattcacggcgcggagcaacgttataacgatatcgctgcttggaattggacccaactgccccaggcgctgagtgttcattgcccagcgcagagctggcgagtcgttgaaacggtgcagctgaccgacgtaatgaaagtcatcgctgcttctccgcgtctgagcttggtagaagttgttctgcctgcaatggatgtcccaccgctgctgcaagcagtgagtgccgctctgaaccagcgcaactcctcttaagaccagaggtaaggaggtaacaaccatgcgagtgttgaagaaacatcttaatcatgcaggggagggtttctaatgacagcggagcagcaaaatggggtatccgactcacgccgtttcgaatttcaggaatttggtggccctatcgccccacagacctatcagctccccgcaccggctagcgatgaagttttgttaaaggtgaactactgcggtgtctgtcacagtgatgttcatcttcacgacggctacttcgagctgggtggcgataaacgtctgaacttcgctatgccgctgccgctgacgctgggtcacgaagtaattggcaccgttgtggctgtcggcgaccaggttactggtgtaaaaccgggggaccagcgactgatctatccgtggataggttgcggaaaatgcggcgcgtgtcaaaaaggagaagaaaacctgtgcgttactcctgcacatctgggcgtgaacaagccgggcggttacgctgatcacatcgttgtaccccattctcgctaccttctggacatttcgggtctgaacccgggtgatgccgctaccctcgcgtgctccggcctgaccactttcagcgcgatcaacaaagtgttgccgcttgcagatgaccagtggattgttgttatcggttgtggtggcctcggccagatggcgctgcgtatcctgcaagctatgggaattggcaatgttatcggtattgacctgtctgaagagaaacggaaactggctcatgaaagcggtgcacgtcactccttcgatccaaacactccgaagctgaaccgcgtggtcgccgaaacctgcccgggtacggtacaggccgcgttagactttgtgggcaatgagcaaactgctcagctggcactgtctctgcttggaaaaggtggcaaatatgttcctgtcgggctgcacggcggcgagctgcgttacccattgccgatcatcacgaacaaagctgtaagtatcatcggttcttacgttggtaccctgaaagaactggaagacttagttgctttcgccaaggaaaagaatctgccgccaattcatattgaacaccgcccgctggaatcggcggctcaggccgtagaggacctggaaaaaggacaggttgctgggcgtgttatcctggatgcaggtaactaagaaggagatatacatatgacccatcaattaagatcgcgcgatatcatcgctctgggctttatgacatttgcgttgttcgtcggcgcaggtaacattattttccctccaatggtcggcttgcaggcaggcgaacacgtctggactgcggcattcggcttcctcattactgccgttggcctaccggtattaacggtagtggcgctggcaaaagttggcggcggtgttgacagtctcagcacgccaattggtaaagtcgctggcgtactgctggcaacagtttgttacctggcggtggggccgctttttgctacgccgcgtacagctaccgtttcttttgaagtgggcattgcgccgctgacgggtgattccgcgctgccgctgtttatttacagcctggtctatttcgctatcgttattctggtttcgctctatccgggcaagctgctggataccgtgggcaacttccttgcgccgctgaaaattatcgcgctggtcatcctgtctgttgccgcaattatctggccggcgggttctatcagtacggcgactgaggcttatcaaaacgctgcgttttctaacggcttcgtcaacggctatctgaccatggatacgctgggcgcaatggtgtttggtatcgttattgttaacgcggcgcgttctcgtggcgttaccgaagcgcgtctgctgacccgttataccgtctgggctggcctgatggcgggtgttggtctgactctgctgtacctggcgctgttccgtctgggttcagacagcgcgtcgctggtcgatcagtctgcaaacggtgcggcgatcctgcatgcttacgttcagcatacctttggcggcggcggtagcttcctgctggcggcgttaatcttcatcgcctgcctggtcacggcggttggcctgacctgtgcttgtgcagaattcttcgcccagtacgtaccgctctcttatcgtacgctggtgtttatcctcggcggcttctcgatggtggtgtctaacctcggcttgagccagctgattcagatctctgtaccggtgctgaccgccatttatccgccgtgtatcgcactggttgtattaagttttacacgctcatggtggcataattcgtcccgcgtgattgctccgccgatgtttatcagcctgctttttggtattctcgacgggatcaaggcatctgcattcagcgatatcttaccgtcctgggcgcagcgtttaccgctggccgaacaaggtctggcgtggttaatgccaacagtggtgatggtggttctggccattatctgggatcgtgcggcaggtcgtcaggtgacctccagcgctcactaatacgcatggcatggatgaccgatggtagtgtgggctctccccatgcgagagtagggaactgccaggcat

SEQ ID NO: 31 - DNA, 5496 bp, Artificial Sequence
  Description of Artificial Sequence: Synthetic polynucleotide
gttgacactctatcattgatagagttattttaccactccctatcagtgatagagaaaagtgagcgaaaaatcaataaggaggcaacaagatgtgcgaaaaacatcttaatcatgctaaggaggttttctaatgatcttcgagacaatttctacgtcgaatcacgaagaagttgtgtattgccataacaaggacgccggcttgaaagcaatcatcgcgattcacaacactgtactcggtccggctctgggtggcactcgcatgtggccctacgctagcgaagaggaagcactgaaagatgtccttcgtttatcccgtgggatgacctacaaagctgcggtttcaggtctaaacctgggcggcggtaaagctgtgatctggggtgatccgaataaagacaagtctgaagcgctgtttagagccttcggacggtttgtaaacagcctgggcggacgctacattaccgcggaggacgttggcattgatgttaacgacatggaatatgtgctgcgtgaaactgattacgtcaccggtgtacatcaggttcacggtgggagtggtgatccttctccattcaccgcatatggcactctgcaaggcctgatggccgctctgcaagtgaaattcggtaacgaagacgtaggcaattacagctacgctgttcagggtgtgggtcacgttggcatggaatttgttaaactgctgcgtgagcgcggtgcaaaggttttcgtcactgacatcaacaaagatgcggtccagcgtgctgtggacgaatttggttgtgaggcagtagccctggatgaaatctatgacgttgattgcgacgtgtactccccgaccgctctgggcggcaccgtgaacgataaaactttaccgcgtctgaaatgtaaggtaatctgcggtgcggcaaacaaccagttagctaatgatgagataggcgtggaactggaaaagaaaggcatcctctatgctccggactacgcggtcaacgcgggtgggctgatgaacgttagcctggaaatcgatggatacaaccgcgaacgtgcgatgcgtatgatgcgtaccatttattacaatttgggtcgcattttcgaaatctctaagcgcgacggcatccctacattccgagccgccgatcgtatggctgaagaacgcataacggccatcggtaaactgcgtttaccgcatttgggcgctgcggcaccgcgcttccagggccgacgtggcaactaagtcaataaaggcatataaaaggaggttaataacatgaaagttaaagtaaaacatcttaatcatgcacaggagactttctaatgtcgacgacaaccgttggtgactacttgctgtatcgcttaaacgaaatcggcattgagcacctcttcggagtgccaggtgattacaatctgcaatttctggatcatgtaatcgaccaccctcagctgacttgggtcggctgcactaacgaacttaacgctgcctacgcagctgatggttatgcgcgttgtcgtccggctgcggcactgctgaccaccttcggggttggcgaactgagcgctattaatggcatcgcaggttcctacgcggagtatctgccggtaatacatatcgttggtgcaccgagtctatcagcccagcagcagggcgacctgattcaccactctcttggcgaaggtgatttttccagcttcctgaggatgtcccaaccggtgtctgttgcgcaggctgctctgactcctgataacgcatgcaaggaaatcgaccgcgtactggcggaagtcctcattcagcgtcgtcccggctacctgctgctgtctaccgacgtggctgctgcgccggcggctctgccacaaagcactctttctttgccgaccgccccggatcatcgcgcagttctggctgctttcagcgacgctgctgagcagatgctggctcaggccaaaagcgtctctctactggcggactttctggctgatcgtttcggtgttactcgagcactggccgcgtggcttcagcaggttccgctaccgcacgccactctgttaatgggtaaaggcgttctgagtgaacagcaaccagggttcgtgggtacctacgctggtgcggcatctatcgattcgacgcgtggcgcaatcgaagaagctggggtaattatcggagtgggagttagattttccgacactatcacagcaggcttctcgcagcagatcgacgcccgccgttttatagacattcaacccttcttctctcgtattggcgatcgccagtttgatcacttgccgatgcaggctgccgtcgcagccctgcatcaactgtgtcttcgttatcagcagcagtggtctatcaccgctcctagcccgcctgcactgccgccggctgctggtagcgagctgtcccagaacgcattctggcaggcgatgcagaacttcatccgccctggggacctgttggtggccgaccaaggtactgcggcgttcggcgcagcggcgctgcgcttaccgcagaattgccagctgcttgtgcagccgctgtggggctcaatcggttacagtctgccggccacctttggtgctcagacggcagatacagagcgtcgtgtaatcctaatcattggcgatggttcagcgcaattaactattcaggaactttccagtatgatgcgtgacggcttgaaacctatcatctttctcctgaacaacaacggttacaccgttgaacgggcgattcacggcgcggagcaacgttataacgatatcgctgcttggaattggacccaactgccccaggcgctgagtgttcattgcccagcgcagagctggcgagtcgttgaaacggtgcagctgaccgacgtaatgaaagtcatcgctgcttctccgcgtctgagcttggtagaagttgttctgcctgcaatggatgtcccaccgctgctgcaagcagtgagtgccgctctgaaccagcgcaactcctcttaagaccagaggtaaggaggtaacaaccatgcgagtgttgaagaaacatcttaatcatgcaggggagggtttctaatgcgcagcatgcagtttgatgagtacggtgcacccctgaaagcgttctcatatgaagacccgaccccgcaagggaaggaagtagtcgttaggatcgaagcctgtggtgtgtgccactctgatattcatcttcacgagggctacttcgacatgggcggtggcaataaagctgatgttactcgtgctcgcgaactcccttttacattgggtcatgaaatcgttggcgaagtggtagcaactggaccaggtgtcaccggcgctaaaccgggcgacaaacgtattgtgtacccgtggatcgggtgcggcgactgcccgaaatgcaacagtggtgaggatcagtcctgtgcgcgtccacgtaacctgggtgttcacgttgacggtggctattcgacgcacgtaaagataccggacgaaaaattcctgttcgcctacgatggtattcctactgagttagcgggaacctatgcttgcagcggcatcaccgcttatggtgcactgatgaaagcaaaggaagcggctgaaagatctggctacatcggtctgattggcgctggtggcgttggcatggctggtctgatgctggccaaagcagcgatcggggctaaaactgtagtctttgatatcgacgacgcaaaactggaagctgcgacccgtgccggggcggattacgtgttcaactccggtgcaaaagaaacacgcaaggaagttatgaaactaacgaatggtggcctgtctggtgctgttgatttcgttggcagcgataaaagcgctctgtttggaatcaacgccttgggtcagaacggcgtgctggtcataattggactgttcggtggcgctatgactgttccggtacccctgttcccgctgaaagggatcaccgtacgtggctcatacgtaggttccctgcaagagatgagtgatatgatggagttagttcgcgctgggaaagttcctccgatgccggtaaaaactcggccactggacgctgcctgggaaacccttgaggatctacgccatggtaaaatcgtgggccgtgttgttctgaccccataagaaggagatatacatatgacccatcaattaagatcgcgcgatatcatcgctctgggctttatgacatttgcgttgttcgtcggcgcaggtaacattattttccctccaatggtcggcttgcaggcaggcgaacacgtctggactgcggcattcggcttcctcattactgccgttggcctaccggtattaacggtagtggcgctggcaaaagttggcggcggtgttgacagtctcagcacgccaattggtaaagtcgctggcgtactgctggcaacagtttgttacctggcggtggggccgctttttgctacgccgcgtacagctaccgtttcttttgaagtgggcattgcgccgctgacgggtgattccgcgctgccgctgtttatttacagcctggtctatttcgctatcgttattctggtttcgctctatccgggcaagctgctggataccgtgggcaacttccttgcgccgctgaaaattatcgcgctggtcatcctgtctgttgccgcaattatctggccggcgggttctatcagtacggcgactgaggcttatcaaaacgctgcgttttctaacggcttcgtcaacggctatctgaccatggatacgctgggcgcaatggtgtttggtatcgttattgttaacgcggcgcgttctcgtggcgttaccgaagcgcgtctgctgacccgttataccgtctgggctggcctgatggcgggtgttggtctgactctgctgtacctggcgctgttccgtctgggttcagacagcgcgtcgctggtcgatcagtctgcaaacggtgcggcgatcctgcatgcttacgttcagcatacctttggcggcggcggtagcttcctgctggcggcgttaatcttcatcgcctgcctggtcacggcggttggcctgacctgtgcttgtgcagaattcttcgcccagtacgtaccgctctcttatcgtacgctggtgtttatcctcggcggcttctcgatggtggtgtctaacctcggcttgagccagctgattcagatctctgtaccggtgctgaccgccatttatccgccgtgtatcgcactggttgtattaagttttacacgctcatggtggcataattcgtcccgcgtgattgctccgccgatgtttatcagcctgctttttggtattctcgacgggatcaaggcatctgcattcagcgatatcttaccgtcctgggcgcagcgtttaccgctggccgaacaaggtctggcgtggttaatgccaacagtggtgatggtggttctggccattatctgggatcgtgcggcaggtcgtcaggtgacctccagcgctcactaatacgcatggcatggatgaccgatggtagtgtgggctctccccatgcgagagtagggaactgccaggcat

SEQ ID NO: 32 - DNA, 5484 bp, Artificial Sequence
  Description of Artificial Sequence: Synthetic polynucleotide
gttgacactctatcattgatagagttattttaccactccctatcagtgatagagaaaagtgagcgaaaaatcaataaggaggcaacaagatgtgcgaaaaacatcttaatcatgctaaggaggttttctaatgcagatcttcgacactttgcaatcaatgggccatgagcaggttgtcctatgtagcgataagaccacgggtctgcgcgccattatcgctatacacgatacatccttagggccggcgcttggtggtacccgtatgtggcagtatgcaactgacgacgatgctattactgacgcactccgtctgtctcggggcatgacctacaaagctgcggtttctggcgtaaatctgggcggtggtaaagccgttatcatcggaaaccctcacagtgataaaagcgaagcgctgtttcgcgcttacggcagaatggtggaatcccagcgtgggcgttacatcaccgccgaagacgttggtactagcgtacgtgatatggagtggattcgcatggaaaccaaatatgtaacgggcgtgggtggcaacggaggctctggtgacccctctccagttaccgctctgggtgtttactcgggcatgaaggcatgcgctaaatcagtctatggtactgatgcgctgagcggtaaaaggatcgtggttcagggcgcgggtaacgttgcatcccatctggttcacagtctggtaaaagaaggcgctgtggttttcgtcactgacatctacgaagaaaaggccaaagcattagcggctgaaacgggcgctaccgtgattcgcaccgacgaggtttttactacacaatgcgatatcttctctccgaacgctctgggggccgtcctgaacgatgaaactattccgcagctcacatgcgctatcgtagctggtggtgcaaacaatcagcttaaaatcgaacaacgtcacgccacggctctgcaagagaaaggcattctgtatgcgccggattacgtaatcaacgccgggggcctcatgaatgtggcgagcgaagttgacggctacaaccgtgaaaaggttatgcgccaggctgaaggtatttacgatattactatgaacatcctaaataccgcgcgtgagcgtaacatcctgaccatcgaagcatccaacgcgattgctgaagagcggatcaacaaagttcgccatgttcacgggaacttcatcggttccccgtctattcgcggagtataagtcaataaaggcatataaaaggaggttaataacatgaaagttaaagtaaaacatcttaatcatgcacaggagactttctaatgtcgacgacaaccgttggtgactacttgctgtatcgcttaaacgaaatcggcattgagcacctcttcggagtgccaggtgattacaatctgcaatttctggatcatgtaatcgaccaccctcagctgacttgggtcggctgcactaacgaacttaacgctgcctacgcagctgatggttatgcgcgttgtcgtccggctgcggcactgctgaccaccttcggggttggcgaactgagcgctattaatggcatcgcaggttcctacgcggagtatctgccggtaatacatatcgttggtgcaccgagtctatcagcccagcagcagggcgacctgattcaccactctcttggcgaaggtgatttttccagcttcctgaggatgtcccaaccggtgtctgttgcgcaggctgctctgactcctgataacgcatgcaaggaaatcgaccgcgtactggcggaagtcctcattcagcgtcgtcccggctacctgctgctgtctaccgacgtggctgctgcgccggcggctctgccacaaagcactctttctttgccgaccgccccggatcatcgcgcagttctggctgctttcagcgacgctgctgagcagatgctggctcaggccaaaagcgtctctctactggcggactttctggctgatcgtttcggtgttactcgagcactggccgcgtggcttcagcaggttccgctaccgcacgccactctgttaatgggtaaaggcgttctgagtgaacagcaaccagggttcgtgggtacctacgctggtgcggcatctatcgattcgacgcgtggcgcaatcgaagaagctggggtaattatcggagtgggagttagattttccgacactatcacagcaggcttctcgcagcagatcgacgcccgccgttttatagacattcaacccttcttctctcgtattggcgatcgccagtttgatcacttgccgatgcaggctgccgtcgcagccctgcatcaactgtgtcttcgttatcagcagcagtggtctatcaccgctcctagcccgcctgcactgccgccggctgctggtagcgagctgtcccagaacgcattctggcaggcgatgcagaacttcatccgccctggggacctgttggtggccgaccaaggtactgcggcgttcggcgcagcggcgctgcgcttaccgcagaattgccagctgcttgtgcagccgctgtggggctcaatcggttacagtctgccggccacctttggtgctcagacggcagatacagagcgtcgtgtaatcctaatcattggcgatggttcagcgcaattaactattcaggaactttccagtatgatgcgtgacggcttgaaacctatcatctttctcctgaacaacaacggttacaccgttgaacgggcgattcacggcgcggagcaacgttataacgatatcgctgcttggaattggacccaactgccccaggcgctgagtgttcattgcccagcgcagagctggcgagtcgttgaaacggtgcagctgaccgacgtaatgaaagtcatcgctgcttctccgcgtctgagcttggtagaagttgttctgcctgcaatggatgtcccaccgctgctgcaagcagtgagtgccgctctgaaccagcgcaactcctcttaagaccagaggtaaggaggtaacaaccatgcgagtgttgaagaaacatcttaatcatgcaggggagggtttctaatgcgcagcatgcagtttgatgagtacggtgcacccctgaaagcgttctcatatgaagacccgaccccgcaagggaaggaagtagtcgttaggatcgaagcctgtggtgtgtgccactctgatattcatcttcacgagggctacttcgacatgggcggtggcaataaagctgatgttactcgtgctcgcgaactcccttttacattgggtcatgaaatcgttggcgaagtggtagcaactggaccaggtgtcaccggcgctaaaccgggcgacaaacgtattgtgtacccgtggatcgggtgcggcgactgcccgaaatgcaacagtggtgaggatcagtcctgtgcgcgtccacgtaacctgggtgttcacgttgacggtggctattcgacgcacgtaaagataccggacgaaaaattcctgttcgcctacgatggtattcctactgagttagcgggaacctatgcttgcagcggcatcaccgcttatggtgcactgatgaaagcaaaggaagcggctgaaagatctggctacatcggtctgattggcgctggtggcgttggcatggctggtctgatgctggccaaagcagcgatcggggctaaaactgtagtctttgatatcgacgacgcaaaactggaagctgcgacccgtgccggggcggattacgtgttcaactccggtgcaaaagaaacacgcaaggaagttatgaaactaacgaatggtggcctgtctggtgctgttgatttcgttggcagcgataaaagcgctctgtttggaatcaacgccttgggtcagaacggcgtgctggtcataattggactgttcggtggcgctatgactgttccggtacccctgttcccgctgaaagggatcaccgtacgtggctcatacgtaggttccctgcaagagatgagtgatatgatggagttagttcgcgctgggaaagttcctccgatgccggtaaaaactcggccactggacgctgcctgggaaacccttgaggatctacgccatggtaaaatcgtgggccgtgttgttctgaccccataagaaggagatatacatatgacccatcaattaagatcgcgcgatatcatcgctctgggctttatgacatttgcgttgttcgtcggcgcaggtaacattattttccctccaatggtcggcttgcaggcaggcgaacacgtctggactgcggcattcggcttcctcattactgccgttggcctaccggtattaacggtagtggcgctggcaaaagttggcggcggtgttgacagtctcagcacgccaattggtaaagtcgctggcgtactgctggcaacagtttgttacctggcggtggggccgctttttgctacgccgcgtacagctaccgtttcttttgaagtgggcattgcgccgctgacgggtgattccgcgctgccgctgtttatttacagcctggtctatttcgctatcgttattctggtttcgctctatccgggcaagctgctggataccgtgggcaacttccttgcgccgctgaaaattatcgcgctggtcatcctgtctgttgccgcaattatctggccggcgggttctatcagtacggcgactgaggcttatcaaaacgctgcgttttctaacggcttcgtcaacggctatctgaccatggatacgctgggcgcaatggtgtttggtatcgttattgttaacgcggcgcgttctcgtggcgttaccgaagcgcgtctgctgacccgttataccgtctgggctggcctgatggcgggtgttggtctgactctgctgtacctggcgctgttccgtctgggttcagacagcgcgtcgctggtcgatcagtctgcaaacggtgcggcgatcctgcatgcttacgttcagcatacctttggcggcggcggtagcttcctgctggcggcgttaatcttcatcgcctgcctggtcacggcggttggcctgacctgtgcttgtgcagaattcttcgcccagtacgtaccgctctcttatcgtacgctggtgtttatcctcggcggcttctcgatggtggtgtctaacctcggcttgagccagctgattcagatctctgtaccggtgctgaccgccatttatccgccgtgtatcgcactggttgtattaagttttacacgctcatggtggcataattcgtcccgcgtgattgctccgccgatgtttatcagcctgctttttggtattctcgacgggatcaaggcatctgcattcagcgatatcttaccgtcctgggcgcagcgtttaccgctggccgaacaaggtctggcgtggttaatgccaacagtggtgatggtggttctggccattatctgggatcgtgcggcaggtcgtcaggtgacctccagcgctcactaatacgcatggcatggatgaccgatggtagtgtgggctctccccatgcgagagtagggaactgccaggcat

SEQ ID NO: 33 - DNA, 5338 bp, Artificial Sequence
  Description of Artificial Sequence: Synthetic polynucleotide
gttgacactctatcattgatagagttattttaccactccctatcagtgatagagaaaagtgagataaacgaatcacaaaggcgaggcaagatgaacatcttcaagaaaatggaggaatttaattatgaacaactggtctacttctacgacagcgaaacggaactcaaaggtattacctgtatacacaacacaactttagggccggcattgggcggtacccgcctttggaactataactctgaggaagatgccgttgaagacgtaatccgtctggctcggggcatgacttacaaagcggcttgcgccggtctgaatctgggcggcggtaaaaccgtgctgatcggtgatgctaaaaagattaaatcagagtcctacttccgtggactggggcgctacgttcagtcgctgaacggcagatatatcaccgcggaagacgtaaatacttctacgaaggatatggcatacgttgctatggaaactgactatgtggtaggcctgggaggtaaatccggcaaccctagtccagttactgcttacggtgcatttatgggtatcaaagcggcgctgatgaaaaaatttgaggatagctctattgaaggccgaaccttcgcagtgcagggtgctgggcagacgggttactatcttatcgattacctcctaggcaacaacaagttcaaagaaaaggctaaaaagatttacttcaccgaaattaacgagagctatatcgagcgtatgaacaaagaacatccggaagttgaatttatttccccggacaaaatctactcgctggaagtagacgtcttcgtgccctgcgccctgggcaaaatcgttaatgacaaaactatcgatgaatttaagtgtccgatcatcgcaggtactgcaaacaacgtactggaaagggaagcgcacggcaacatgcttaaagaacgtggcattctttacgccccggactatgtgatcaatgctggtgggctgatcaacgtttaccacgagctgaacggttacaataaagagaacgctattctggaagtggaattaatttatgatcgcctactggaaatattcaacatcgctgattctctgaacatcagcaccaatatcgctgccaacgagttcgcggaaaaacgtatcaagcaaattaagtccttgaaaaacaacttcattaaacgctaagaccattaataaggaacattttatgtcgacgacaaccgttggtgactacttgctgtatcgcttaaacgaaatcggcattgagcacctcttcggagtgccaggtgattacaatctgcaatttctggatcatgtaatcgaccaccctcagctgacttgggtcggctgcactaacgaacttaacgctgcctacgcagctgatggttatgcgcgttgtcgtccggctgcggcactgctgaccaccttcggggttggcgaactgagcgctattaatggcatcgcaggttcctacgcggagtatctgccggtaatacatatcgttggtgcaccgagtctatcagcccagcagcagggcgacctgattcaccactctcttggcgaaggtgatttttccagcttcctgaggatgtcccaaccggtgtctgttgcgcaggctgctctgactcctgataacgcatgcaaggaaatcgaccgcgtactggcggaagtcctcattcagcgtcgtcccggctacctgctgctgtctaccgacgtggctgctgcgccggcggctctgccacaaagcactctttctttgccgaccgccccggatcatcgcgcagttctggctgctttcagcgacgctgctgagcagatgctggctcaggccaaaagcgtctctctactggcggactttctggctgatcgtttcggtgttactcgagcactggccgcgtggcttcagcaggttccgctaccgcacgccactctgttaatgggtaaaggcgttctgagtgaacagcaaccagggttcgtgggtacctacgctggtgcggcatctatcgattcgacgcgtggcgcaatcgaagaagctggggtaattatcggagtgggagttagattttccgacactatcacagcaggcttctcgcagcagatcgacgcccgccgttttatagacattcaacccttcttctctcgtattggcgatcgccagtttgatcacttgccgatgcaggctgccgtcgcagccctgcatcaactgtgtcttcgttatcagcagcagtggtctatcaccgctcctagcccgcctgcactgccgccggctgctggtagcgagctgtcccagaacgcattctggcaggcgatgcagaacttcatccgccctggggacctgttggtggccgaccaaggtactgcggcgttcggcgcagcggcgctgcgcttaccgcagaattgccagctgcttgtgcagccgctgtggggctcaatcggttacagtctgccggccacctttggtgctcagacggcagatacagagcgtcgtgtaatcctaatcattggcgatggttcagcgcaattaactattcaggaactttccagtatgatgcgtgacggcttgaaacctatcatctttctcctgaacaacaacggttacaccgttgaacgggcgattcacggcgcggagcaacgttataacgatatcgctgcttggaattggacccaactgccccaggcgctgagtgttcattgcccagcgcagagctggcgagtcgttgaaacggtgcagctgaccgacgtaatgaaagtcatcgctgcttctccgcgtctgagcttggtagaagttgttctgcctgcaatggatgtcccaccgctgctgcaagcagtgagtgccgctctgaaccagcgcaactcctcttaatccctccctacgggttaaggagcccctgctatgcgcagcatgcagtttgatgagtacggtgcacccctgaaagcgttctcatatgaagacccgaccccgcaagggaaggaagtagtcgttaggatcgaagcctgtggtgtgtgccactctgatattcatcttcacgagggctacttcgacatgggcggtggcaataaagctgatgttactcgtgctcgcgaactcccttttacattgggtcatgaaatcgttggcgaagtggtagcaactggaccaggtgtcaccggcgctaaaccgggcgacaaacgtattgtgtacccgtggatcgggtgcggcgactgcccgaaatgcaacagtggtgaggatcagtcctgtgcgcgtccacgtaacctgggtgttcacgttgacggtggctattcgacgcacgtaaagataccggacgaaaaattcctgttcgcctacgatggtattcctactgagttagcgggaacctatgcttgcagcggcatcaccgcttatggtgcactgatgaaagcaaaggaagcggctgaaagatctggctacatcggtctgattggcgctggtggcgttggcatggctggtctgatgctggccaaagcagcgatcggggctaaaactgtagtctttgatatcgacgacgcaaaactggaagctgcgacccgtgccggggcggattacgtgttcaactccggtgcaaaagaaacacgcaaggaagttatgaaactaacgaatggtggcctgtctggtgctgttgatttcgttggcagcgataaaagcgctctgtttggaatcaacgccttgggtcagaacggcgtgctggtcataattggactgttcggtggcgctatgactgttccggtacccctgttcccgctgaaagggatcaccgtacgtggctcatacgtaggttccctgcaagagatgagtgatatgatggagttagttcgcgctgggaaagttcctccgatgccggtaaaaactcggccactggacgctgcctgggaaacccttgaggatctacgccatggtaaaatcgtgggccgtgttgttctgaccccataagaaggagatatacatatgacccatcaattaagatcgcgcgatatcatcgctctgggctttatgacatttgcgttgttcgtcggcgcaggtaacattattttccctccaatggtcggcttgcaggcaggcgaacacgtctggactgcggcattcggcttcctcattactgccgttggcctaccggtattaacggtagtggcgctggcaaaagttggcggcggtgttgacagtctcagcacgccaattggtaaagtcgctggcgtactgctggcaacagtttgttacctggcggtggggccgctttttgctacgccgcgtacagctaccgtttcttttgaagtgggcattgcgccgctgacgggtgattccgcgctgccgctgtttatttacagcctggtctatttcgctatcgttattctggtttcgctctatccgggcaagctgctggataccgtgggcaacttccttgcgccgctgaaaattatcgcgctggtcatcctgtctgttgccgcaattatctggccggcgggttctatcagtacggcgactgaggcttatcaaaacgctgcgttttctaacggcttcgtcaacggctatctgaccatggatacgctgggcgcaatggtgtttggtatcgttattgttaacgcggcgcgttctcgtggcgttaccgaagcgcgtctgctgacccgttataccgtctgggctggcctgatggcgggtgttggtctgactctgctgtacctggcgctgttccgtctgggttcagacagcgcgtcgctggtcgatcagtctgcaaacggtgcggcgatcctgcatgcttacgttcagcatacctttggcggcggcggtagcttcctgctggcggcgttaatcttcatcgcctgcctggtcacggcggttggcctgacctgtgcttgtgcagaattcttcgcccagtacgtaccgctctcttatcgtacgctggtgtttatcctcggcggcttctcgatggtggtgtctaacctcggcttgagccagctgattcagatctctgtaccggtgctgaccgccatttatccgccgtgtatcgcactggttgtattaagttttacacgctcatggtggcataattcgtcccgcgtgattgctccgccgatgtttatcagcctgctttttggtattctcgacgggatcaaggcatctgcattcagcgatatcttaccgtcctgggcgcagcgtttaccgctggccgaacaaggtctggcgtggttaatgccaacagtggtgatggtggttctggccattatctgggatcgtgcggcaggtcgtcaggtgacctccagcgctcactaatacgcatggcatggatgaccgatggtagtgtgggctctccccatgcgagagtagggaactgccaggcat

SEQ ID NO: 34 - DNA, 5336 bp, Artificial Sequence
  Description of Artificial Sequence: Synthetic polynucleotide
gttgacactctatcattgatagagttattttaccactccctatcagtgatagagaaaagtgagagctagataataaggacggcacaagatgaacatcttcaagaaaatggaggaatttaattatgaacaactggtctacttctacgacagcgaaacggaactcaaaggtattacctgtatacacaacacaactttagggccggcattgggcggtacccgcctttggaactataactctgaggaagatgccgttgaagacgtaatccgtctggctcggggcatgacttacaaagcggcttgcgccggtctgaatctgggcggcggtaaaaccgtgctgatcggtgatgctaaaaagattaaatcagagtcctacttccgtggactggggcgctacgttcagtcgctgaacggcagatatatcaccgcggaagacgtaaatacttctacgaaggatatggcatacgttgctatggaaactgactatgtggtaggcctgggaggtaaatccggcaaccctagtccagttactgcttacggtgcatttatgggtatcaaagcggcgctgatgaaaaaatttgaggatagctctattgaaggccgaaccttcgcagtgcagggtgctgggcagacgggttactatcttatcgattacctcctaggcaacaacaagttcaaagaaaaggctaaaaagatttacttcaccgaaattaacgagagctatatcgagcgtatgaacaaagaacatccggaagttgaatttatttccccggacaaaatctactcgctggaagtagacgtcttcgtgccctgcgccctgggcaaaatcgttaatgacaaaactatcgatgaatttaagtgtccgatcatcgcaggtactgcaaacaacgtactggaaagggaagcgcacggcaacatgcttaaagaacgtggcattctttacgccccggactatgtgatcaatgctggtgggctgatcaacgtttaccacgagctgaacggttacaataaagagaacgctattctggaagtggaattaatttatgatcgcctactggaaatattcaacatcgctgattctctgaacatcagcaccaatatcgctgccaacgagttcgcggaaaaacgtatcaagcaaattaagtccttgaaaaacaacttcattaaacgctaagaccattaataaggaacattttatgtcgacgacaaccgttggtgactacttgctgtatcgcttaaacgaaatcggcattgagcacctcttcggagtgccaggtgattacaatctgcaatttctggatcatgtaatcgaccaccctcagctgacttgggtcggctgcactaacgaacttaacgctgcctacgcagctgatggttatgcgcgttgtcgtccggctgcggcactgctgaccaccttcggggttggcgaactgagcgctattaatggcatcgcaggttcctacgcggagtatctgccggtaatacatatcgttggtgcaccgagtctatcagcccagcagcagggcgacctgattcaccactctcttggcgaaggtgatttttccagcttcctgaggatgtcccaaccggtgtctgttgcgcaggctgctctgactcctgataacgcatgcaaggaaatcgaccgcgtactggcggaagtcctcattcagcgtcgtcccggctacctgctgctgtctaccgacgtggctgctgcgccggcggctctgccacaaagcactctttctttgccgaccgccccggatcatcgcgcagttctggctgctttcagcgacgctgctgagcagatgctggctcaggccaaaagcgtctctctactggcggactttctggctgatcgtttcggtgttactcgagcactggccgcgtggcttcagcaggttccgctaccgcacgccactctgttaatgggtaaaggcgttctgagtgaacagcaaccagggttcgtgggtacctacgctggtgcggcatctatcgattcgacgcgtggcgcaatcgaagaagctggggtaattatcggagtgggagttagattttccgacactatcacagcaggcttctcgcagcagatcgacgcccgccgttttatagacattcaacccttcttctctcgtattggcgatcgccagtttgatcacttgccgatgcaggctgccgtcgcagccctgcatcaactgtgtcttcgttatcagcagcagtggtctatcaccgctcctagcccgcctgcactgccgccggctgctggtagcgagctgtcccagaacgcattctggcaggcgatgcagaacttcatccgccctggggacctgttggtggccgaccaaggtactgcggcgttcggcgcagcggcgctgcgcttaccgcagaattgccagctgcttgtgcagccgctgtggggctcaatcggttacagtctgccggccacctttggtgctcagacggcagatacagagcgtcgtgtaatcctaatcattggcgatggttcagcgcaattaactattcaggaactttccagtatgatgcgtgacggcttgaaacctatcatctttctcctgaacaacaacggttacaccgttgaacgggcgattcacggcgcggagcaacgttataacgatatcgctgcttggaattggacccaactgccccaggcgctgagtgttcattgcccagcgcagagctggcgagtcgttgaaacggtgcagctgaccgacgtaatgaaagtcatcgctgcttctccgcgtctgagcttggtagaagttgttctgcctgcaatggatgtcccaccgctgctgcaagcagtgagtgccgctctgaaccagcgcaactcctcttaatccctccctacgggttaaggagcccctgctatgcgcagcatgcagtttgatgagtacggtgcacccctgaaagcgttctcatatgaagacccgaccccgcaagggaaggaagtagtcgttaggatcgaagcctgtggtgtgtgccactctgatattcatcttcacgagggctacttcgacatgggcggtggcaataaagctgatgttactcgtgctcgcgaactcccttttacattgggtcatgaaatcgttggcgaagtggtagcaactggaccaggtgtcaccggcgctaaaccgggcgacaaacgtattgtgtacccgtggatcgggtgcggcgactgcccgaaatgcaacagtggtgaggatcagtcctgtgcgcgtccacgtaacctgggtgttcacgttgacggtggctattcgacgcacgtaaagataccggacgaaaaattcctgttcgcctacgatggtattcctactgagttagcgggaacctatgcttgcagcggcatcaccgcttatggtgcactgatgaaagcaaaggaagcggctgaaagatctggctacatcggtctgattggcgctggtggcgttggcatggctggtctgatgctggccaaagcagcgatcggggctaaaactgtagtctttgatatcgacgacgcaaaactggaagctgcgacccgtgccggggcggattacgtgttcaactccggtgcaaaagaaacacgcaaggaagttatgaaactaacgaatggtggcctgtctggtgctgttgatttcgttggcagcgataaaagcgctctgtttggaatcaacgccttgggtcagaacggcgtgctggtcataattggactgttcggtggcgctatgactgttccggtacccctgttcccgctgaaagggatcaccgtacgtggctcatacgtaggttccctgcaagagatgagtgatatgatggagttagttcgcgctgggaaagttcctccgatgccggtaaaaactcggccactggacgctgcctgggaaacccttgaggatctacgccatggtaaaatcgtgggccgtgttgttctgaccccataagaaggagatatacatatgacccatcaattaagatcgcgcgatatcatcgctctgggctttatgacatttgcgttgttcgtcggcgcaggtaacattattttccctccaatggtcggcttgcaggcaggcgaacacgtctggactgcggcattcggcttcctcattactgccgttggcctaccggtattaacggtagtggcgctggcaaaagttggcggcggtgttgacagtctcagcacgccaattggtaaagtcgctggcgtactgctggcaacagtttgttacctggcggtggggccgctttttgctacgccgcgtacagctaccgtttcttttgaagtgggcattgcgccgctgacgggtgattccgcgctgccgctgtttatttacagcctggtctatttcgctatcgttattctggtttcgctctatccgggcaagctgctggataccgtgggcaacttccttgcgccgctgaaaattatcgcgctggtcatcctgtctgttgccgcaattatctggccggcgggttctatcagtacggcgactgaggcttatcaaaacgctgcgttttctaacggcttcgtcaacggctatctgaccatggatacgctgggcgcaatggtgtttggtatcgttattgttaacgcggcgcgttctcgtggcgttaccgaagcgcgtctgctgacccgttataccgtctgggctggcctgatggcgggtgttggtctgactctgctgtacctggcgctgttccgtctgggttcagacagcgcgtcgctggtcgatcagtctgcaaacggtgcggcgatcctgcatgcttacgttcagcatacctttggcggcggcggtagcttcctgctggcggcgttaatcttcatcgcctgcctggtcacggcggttggcctgacctgtgcttgtgcagaattcttcgcccagtacgtaccgctctcttatcgtacgctggtgtttatcctcggcggcttctcgatggtggtgtctaacctcggcttgagccagctgattcagatctctgtaccggtgctgaccgccatttatccgccgtgtatcgcactggttgtattaagttttacacgctcatggtggcataattcgtcccgcgtgattgctccgccgatgtttatcagcctgctttttggtattctcgacgggatcaaggcatctgcattcagcgatatcttaccgtcctgggcgcagcgtttaccgctggccgaacaaggtctggcgtggttaatgccaacagtggtgatggtggttctggccattatctgggatcgtgcggcaggtcgtcaggtgacctccagcgctcactaatacgcatggcatggatgaccgatggtagtgtgggctctccccatgcgagagtagggaactgccaggcat

SEQ ID NO: 35 - DNA, 5385 bp, Artificial Sequence
  Description of Artificial Sequence: Synthetic polynucleotide
gttgacactctatcattgatagagttattttaccactccctatcagtgatagagaaaagtgaactacagtatataaggagggtaatatgatcttcgagacaatttctacgtcgaatcacgaagaagttgtgtattgccataacaaggacgccggcttgaaagcaatcatcgcgattcacaacactgtactcggtccggctctgggtggcactcgcatgtggccctacgctagcgaagaggaagcactgaaagatgtccttcgtttatcccgtgggatgacctacaaagctgcggtttcaggtctaaacctgggcggcggtaaagctgtgatctggggtgatccgaataaagacaagtctgaagcgctgtttagagccttcggacggtttgtaaacagcctgggcggacgctacattaccgcggaggacgttggcattgatgttaacgacatggaatatgtgctgcgtgaaactgattacgtcaccggtgtacatcaggttcacggtgggagtggtgatccttctccattcaccgcatatggcactctgcaaggcctgatggccgctctgcaagtgaaattcggtaacgaagacgtaggcaattacagctacgctgttcagggtgtgggtcacgttggcatggaatttgttaaactgctgcgtgagcgcggtgcaaaggttttcgtcactgacatcaacaaagatgcggtccagcgtgctgtggacgaatttggttgtgaggcagtagccctggatgaaatctatgacgttgattgcgacgtgtactccccgaccgctctgggcggcaccgtgaacgataaaactttaccgcgtctgaaatgtaaggtaatctgcggtgcggcaaacaaccagttagctaatgatgagataggcgtggaactggaaaagaaaggcatcctctatgctccggactacgcggtcaacgcgggtgggctgatgaacgttagcctggaaatcgatggatacaaccgcgaacgtgcgatgcgtatgatgcgtaccatttattacaatttgggtcgcattttcgaaatctctaagcgcgacggcatccctacattccgagccgccgatcgtatggctgaagaacgcataacggccatcggtaaactgcgtttaccgcatttgggcgctgcggcaccgcgcttccagggccgacgtggcaactaattacgacattttaaggaggttcgcatgtcgacgacaaccgttggtgactacttgctgtatcgcttaaacgaaatcggcattgagcacctcttcggagtgccaggtgattacaatctgcaatttctggatcatgtaatcgaccaccctcagctgacttgggtcggctgcactaacgaacttaacgctgcctacgcagctgatggttatgcgcgttgtcgtccggctgcggcactgctgaccaccttcggggttggcgaactgagcgctattaatggcatcgcaggttcctacgcggagtatctgccggtaatacatatcgttggtgcaccgagtctatcagcccagcagcagggcgacctgattcaccactctcttggcgaaggtgatttttccagcttcctgaggatgtcccaaccggtgtctgttgcgcaggctgctctgactcctgataacgcatgcaaggaaatcgaccgcgtactggcggaagtcctcattcagcgtcgtcccggctacctgctgctgtctaccgacgtggctgctgcgccggcggctctgccacaaagcactctttctttgccgaccgccccggatcatcgcgcagttctggctgctttcagcgacgctgctgagcagatgctggctcaggccaaaagcgtctctctactggcggactttctggctgatcgtttcggtgttactcgagcactggccgcgtggcttcagcaggttccgctaccgcacgccactctgttaatgggtaaaggcgttctgagtgaacagcaaccagggttcgtgggtacctacgctggtgcggcatctatcgattcgacgcgtggcgcaatcgaagaagctggggtaattatcggagtgggagttagattttccgacactatcacagcaggcttctcgcagcagatcgacgcccgccgttttatagacattcaacccttcttctctcgtattggcgatcgccagtttgatcacttgccgatgcaggctgccgtcgcagccctgcatcaactgtgtcttcgttatcagcagcagtggtctatcaccgctcctagcccgcctgcactgccgccggctgctggtagcgagctgtcccagaacgcattctggcaggcgatgcagaacttcatccgccctggggacctgttggtggccgaccaaggtactgcggcgttcggcgcagcggcgctgcgcttaccgcagaattgccagctgcttgtgcagccgctgtggggctcaatcggttacagtctgccggccacctttggtgctcagacggcagatacagagcgtcgtgtaatcctaatcattggcgatggttcagcgcaattaactattcaggaactttccagtatgatgcgtgacggcttgaaacctatcatctttctcctgaacaacaacggttacaccgttgaacgggcgattcacggcgcggagcaacgttataacgatatcgctgcttggaattggacccaactgccccaggcgctgagtgttcattgcccagcgcagagctggcgagtcgttgaaacggtgcagctgaccgacgtaatgaaagtcatcgctgcttctccgcgtctgagcttggtagaagttgttctgcctgcaatggatgtcccaccgctgctgcaagcagtgagtgccgctctgaaccagcgcaactcctcttaaatttttcaacggcctatcataaggaggaataatgacagcggagcagcaaaatggggtatccgactcacgccgtttcgaatttcaggaatttggtggccctatcgccccacagacctatcagctccccgcaccggctagcgatgaagttttgttaaaggtgaactactgcggtgtctgtcacagtgatgttcatcttcacgacggctacttcgagctgggtggcgataaacgtctgaacttcgctatgccgctgccgctgacgctgggtcacgaagtaattggcaccgttgtggctgtcggcgaccaggttactggtgtaaaaccgggggaccagcgactgatctatccgtggataggttgcggaaaatgcggcgcgtgtcaaaaaggagaagaaaacctgtgcgttactcctgcacatctgggcgtgaacaagccgggcggttacgctgatcacatcgttgtaccccattctcgctaccttctggacatttcgggtctgaacccgggtgatgccgctaccctcgcgtgctccggcctgaccactttcagcgcgatcaacaaagtgttgccgcttgcagatgaccagtggattgttgttatcggttgtggtggcctcggccagatggcgctgcgtatcctgcaagctatgggaattggcaatgttatcggtattgacctgtctgaagagaaacggaaactggctcatgaaagcggtgcacgtcactccttcgatccaaacactccgaagctgaaccgcgtggtcgccgaaacctgcccgggtacggtacaggccgcgttagactttgtgggcaatgagcaaactgctcagctggcactgtctctgcttggaaaaggtggcaaatatgttcctgtcgggctgcacggcggcgagctgcgttacccattgccgatcatcacgaacaaagctgtaagtatcatcggttcttacgttggtaccctgaaagaactggaagacttagttgctttcgccaaggaaaagaatctgccgccaattcatattgaacaccgcccgctggaatcggcggctcaggccgtagaggacctggaaaaaggacaggttgctgggcgtgttatcctggatgcaggtaactaagaaggagatatacatatgacccatcaattaagatcgcgcgatatcatcgctctgggctttatgacatttgcgttgttcgtcggcgcaggtaacattattttccctccaatggtcggcttgcaggcaggcgaacacgtctggactgcggcattcggcttcctcattactgccgttggcctaccggtattaacggtagtggcgctggcaaaagttggcggcggtgttgacagtctcagcacgccaattggtaaagtcgctggcgtactgctggcaacagtttgttacctggcggtggggccgctttttgctacgccgcgtacagctaccgtttcttttgaagtgggcattgcgccgctgacgggtgattccgcgctgccgctgtttatttacagcctggtctatttcgctatcgttattctggtttcgctctatccgggcaagctgctggataccgtgggcaacttccttgcgccgctgaaaattatcgcgctggtcatcctgtctgttgccgcaattatctggccggcgggttctatcagtacggcgactgaggcttatcaaaacgctgcgttttctaacggcttcgtcaacggctatctgaccatggatacgctgggcgcaatggtgtttggtatcgttattgttaacgcggcgcgttctcgtggcgttaccgaagcgcgtctgctgacccgttataccgtctgggctggcctgatggcgggtgttggtctgactctgctgtacctggcgctgttccgtctgggttcagacagcgcgtcgctggtcgatcagtctgcaaacggtgcggcgatcctgcatgcttacgttcagcatacctttggcggcggcggtagcttcctgctggcggcgttaatcttcatcgcctgcctggtcacggcggttggcctgacctgtgcttgtgcagaattcttcgcccagtacgtaccgctctcttatcgtacgctggtgtttatcctcggcggcttctcgatggtggtgtctaacctcggcttgagccagctgattcagatctctgtaccggtgctgaccgccatttatccgccgtgtatcgcactggttgtattaagttttacacgctcatggtggcataattcgtcccgcgtgattgctccgccgatgtttatcagcctgctttttggtattctcgacgggatcaaggcatctgcattcagcgatatcttaccgtcctgggcgcagcgtttaccgctggccgaacaaggtctggcgtggttaatgccaacagtggtgatggtggttctggccattatctgggatcgtgcggcaggtcgtcaggtgacctccagcgctcactaatacgcatggcatggatgaccgatggtagtgtgggctctccccatgcgagagtagggaactgccaggcat

SEQ ID NO: 36 - DNA, 5384 bp, Artificial Sequence
  Description of Artificial Sequence: Synthetic polynucleotide
gttgacactctatcattgatagagttattttaccactccctatcagtgatagagaaaagtgaagtttacccgcgggattggaggtacacatgcagatcttcgacactttgcaatcaatgggccatgagcaggttgtcctatgtagcgataagaccacgggtctgcgcgccattatcgctatacacgatacatccttagggccggcgcttggtggtacccgtatgtggcagtatgcaactgacgacgatgctattactgacgcactccgtctgtctcggggcatgacctacaaagctgcggtttctggcgtaaatctgggcggtggtaaagccgttatcatcggaaaccctcacagtgataaaagcgaagcgctgtttcgcgcttacggcagaatggtggaatcccagcgtgggcgttacatcaccgccgaagacgttggtactagcgtacgtgatatggagtggattcgcatggaaaccaaatatgtaacgggcgtgggtggcaacggaggctctggtgacccctctccagttaccgctctgggtgtttactcgggcatgaaggcatgcgctaaatcagtctatggtactgatgcgctgagcggtaaaaggatcgtggttcagggcgcgggtaacgttgcatcccatctggttcacagtctggtaaaagaaggcgctgtggttttcgtcactgacatctacgaagaaaaggccaaagcattagcggctgaaacgggcgctaccgtgattcgcaccgacgaggtttttactacacaatgcgatatcttctctccgaacgctctgggggccgtcctgaacgatgaaactattccgcagctcacatgcgctatcgtagctggtggtgcaaacaatcagcttaaaatcgaacaacgtcacgccacggctctgcaagagaaaggcattctgtatgcgccggattacgtaatcaacgccgggggcctcatgaatgtggcgagcgaagttgacggctacaaccgtgaaaaggttatgcgccaggctgaaggtatttacgatattactatgaacatcctaaataccgcgcgtgagcgtaacatcctgaccatcgaagcatccaacgcgattgctgaagagcggatcaacaaagttcgccatgttcacgggaacttcatcggttccccgtctattcgcggagtataataaatcaaaacaccaaattaaggagaaattttatgtcgacgacaaccgttggtgactacttgctgtatcgcttaaacgaaatcggcattgagcacctcttcggagtgccaggtgattacaatctgcaatttctggatcatgtaatcgaccaccctcagctgacttgggtcggctgcactaacgaacttaacgctgcctacgcagctgatggttatgcgcgttgtcgtccggctgcggcactgctgaccaccttcggggttggcgaactgagcgctattaatggcatcgcaggttcctacgcggagtatctgccggtaatacatatcgttggtgcaccgagtctatcagcccagcagcagggcgacctgattcaccactctcttggcgaaggtgatttttccagcttcctgaggatgtcccaaccggtgtctgttgcgcaggctgctctgactcctgataacgcatgcaaggaaatcgaccgcgtactggcggaagtcctcattcagcgtcgtcccggctacctgctgctgtctaccgacgtggctgctgcgccggcggctctgccacaaagcactctttctttgccgaccgccccggatcatcgcgcagttctggctgctttcagcgacgctgctgagcagatgctggctcaggccaaaagcgtctctctactggcggactttctggctgatcgtttcggtgttactcgagcactggccgcgtggcttcagcaggttccgctaccgcacgccactctgttaatgggtaaaggcgttctgagtgaacagcaaccagggttcgtgggtacctacgctggtgcggcatctatcgattcgacgcgtggcgcaatcgaagaagctggggtaattatcggagtgggagttagattttccgacactatcacagcaggcttctcgcagcagatcgacgcccgccgttttatagacattcaacccttcttctctcgtattggcgatcgccagtttgatcacttgccgatgcaggctgccgtcgcagccctgcatcaactgtgtcttcgttatcagcagcagtggtctatcaccgctcctagcccgcctgcactgccgccggctgctggtagcgagctgtcccagaacgcattctggcaggcgatgcagaacttcatccgccctggggacctgttggtggccgaccaaggtactgcggcgttcggcgcagcggcgctgcgcttaccgcagaattgccagctgcttgtgcagccgctgtggggctcaatcggttacagtctgccggccacctttggtgctcagacggcagatacagagcgtcgtgtaatcctaatcattggcgatggttcagcgcaattaactattcaggaactttccagtatgatgcgtgacggcttgaaacctatcatctttctcctgaacaacaacggttacaccgttgaacgggcgattcacggcgcggagcaacgttataacgatatcgctgcttggaattggacccaactgccccaggcgctgagtgttcattgcccagcgcagagctggcgagtcgttgaaacggtgcagctgaccgacgtaatgaaagtcatcgctgcttctccgcgtctgagcttggtagaagttgttctgcctgcaatggatgtcccaccgctgctgcaagcagtgagtgccgctctgaaccagcgcaactcctcttaaatttttcaacggcctatcataaggaggaataatgacagcggagcagcaaaatggggtatccgactcacgccgtttcgaatttcaggaatttggtggccctatcgccccacagacctatcagctccccgcaccggctagcgatgaagttttgttaaaggtgaactactgcggtgtctgtcacagtgatgttcatcttcacgacggctacttcgagctgggtggcgataaacgtctgaacttcgctatgccgctgccgctgacgctgggtcacgaagtaattggcaccgttgtggctgtcggcgaccaggttactggtgtaaaaccgggggaccagcgactgatctatccgtggataggttgcggaaaatgcggcgcgtgtcaaaaaggagaagaaaacctgtgcgttactcctgcacatctgggcgtgaacaagccgggcggttacgctgatcacatcgttgtaccccattctcgctaccttctggacatttcgggtctgaacccgggtgatgccgctaccctcgcgtgctccggcctgaccactttcagcgcgatcaacaaagtgttgccgcttgcagatgaccagtggattgttgttatcggttgtggtggcctcggccagatggcgctgcgtatcctgcaagctatgggaattggcaatgttatcggtattgacctgtctgaagagaaacggaaactggctcatgaaagcggtgcacgtcactccttcgatccaaacactccgaagctgaaccgcgtggtcgccgaaacctgcccgggtacggtacaggccgcgttagactttgtgggcaatgagcaaactgctcagctggcactgtctctgcttggaaaaggtggcaaatatgttcctgtcgggctgcacggcggcgagctgcgttacccattgccgatcatcacgaacaaagctgtaagtatcatcggttcttacgttggtaccctgaaagaactggaagacttagttgctttcgccaaggaaaagaatctgccgccaattcatattgaacaccgcccgctggaatcggcggctcaggccgtagaggacctggaaaaaggacaggttgctgggcgtgttatcctggatgcaggtaactaagaaggagatatacatatgacccatcaattaagatcgcgcgatatcatcgctctgggctttatgacatttgcgttgttcgtcggcgcaggtaacattattttccctccaatggtcggcttgcaggcaggcgaacacgtctggactgcggcattcggcttcctcattactgccgttggcctaccggtattaacggtagtggcgctggcaaaagttggcggcggtgttgacagtctcagcacgccaattggtaaagtcgctggcgtactgctggcaacagtttgttacctggcggtggggccgctttttgctacgccgcgtacagctaccgtttcttttgaagtgggcattgcgccgctgacgggtgattccgcgctgccgctgtttatttacagcctggtctatttcgctatcgttattctggtttcgctctatccgggcaagctgctggataccgtgggcaacttccttgcgccgctgaaaattatcgcgctggtcatcctgtctgttgccgcaattatctggccggcgggttctatcagtacggcgactgaggcttatcaaaacgctgcgttttctaacggcttcgtcaacggctatctgaccatggatacgctgggcgcaatggtgtttggtatcgttattgttaacgcggcgcgttctcgtggcgttaccgaagcgcgtctgctgacccgttataccgtctgggctggcctgatggcgggtgttggtctgactctgctgtacctggcgctgttccgtctgggttcagacagcgcgtcgctggtcgatcagtctgcaaacggtgcggcgatcctgcatgcttacgttcagcatacctttggcggcggcggtagcttcctgctggcggcgttaatcttcatcgcctgcctggtcacggcggttggcctgacctgtgcttgtgcagaattcttcgcccagtacgtaccgctctcttatcgtacgctggtgtttatcctcggcggcttctcgatggtggtgtctaacctcggcttgagccagctgattcagatctctgtaccggtgctgaccgccatttatccgccgtgtatcgcactggttgtattaagttttacacgctcatggtggcataattcgtcccgcgtgattgctccgccgatgtttatcagcctgctttttggtattctcgacgggatcaaggcatctgcattcagcgatatcttaccgtcctgggcgcagcgtttaccgctggccgaacaaggtctggcgtggttaatgccaacagtggtgatggtggttctggccattatctgggatcgtgcggcaggtcgtcaggtgacctccagcgctcactaatacgcatggcatggatgaccgatggtagtgtgggctctccccatgcgagagtagggaactgccaggcat

SEQ ID NO: 37 - DNA, 5350 bp, Artificial Sequence
  Description of Artificial Sequence: Synthetic polynucleotide
gttgacactctatcattgatagagttattttaccactccctatcagtgatagagaaaagtgaaatattcacgtaaggaggtaatagatgcagatcttcgacactttgcaatcaatgggccatgagcaggttgtcctatgtagcgataagaccacgggtctgcgcgccattatcgctatacacgatacatccttagggccggcgcttggtggtacccgtatgtggcagtatgcaactgacgacgatgctattactgacgcactccgtctgtctcggggcatgacctacaaagctgcggtttctggcgtaaatctgggcggtggtaaagccgttatcatcggaaaccctcacagtgataaaagcgaagcgctgtttcgcgcttacggcagaatggtggaatcccagcgtgggcgttacatcaccgccgaagacgttggtactagcgtacgtgatatggagtggattcgcatggaaaccaaatatgtaacgggcgtgggtggcaacggaggctctggtgacccctctccagttaccgctctgggtgtttactcgggcatgaaggcatgcgctaaatcagtctatggtactgatgcgctgagcggtaaaaggatcgtggttcagggcgcgggtaacgttgcatcccatctggttcacagtctggtaaaagaaggcgctgtggttttcgtcactgacatctacgaagaaaaggccaaagcattagcggctgaaacgggcgctaccgtgattcgcaccgacgaggtttttactacacaatgcgatatcttctctccgaacgctctgggggccgtcctgaacgatgaaactattccgcagctcacatgcgctatcgtagctggtggtgcaaacaatcagcttaaaatcgaacaacgtcacgccacggctctgcaagagaaaggcattctgtatgcgccggattacgtaatcaacgccgggggcctcatgaatgtggcgagcgaagttgacggctacaaccgtgaaaaggttatgcgccaggctgaaggtatttacgatattactatgaacatcctaaataccgcgcgtgagcgtaacatcctgaccatcgaagcatccaacgcgattgctgaagagcggatcaacaaagttcgccatgttcacgggaacttcatcggttccccgtctattcgcggagtataataaatcaaaacaccaaattaaggagaaattttatgtcgacgacaaccgttggtgactacttgctgtatcgcttaaacgaaatcggcattgagcacctcttcggagtgccaggtgattacaatctgcaatttctggatcatgtaatcgaccaccctcagctgacttgggtcggctgcactaacgaacttaacgctgcctacgcagctgatggttatgcgcgttgtcgtccggctgcggcactgctgaccaccttcggggttggcgaactgagcgctattaatggcatcgcaggttcctacgcggagtatctgccggtaatacatatcgttggtgcaccgagtctatcagcccagcagcagggcgacctgattcaccactctcttggcgaaggtgatttttccagcttcctgaggatgtcccaaccggtgtctgttgcgcaggctgctctgactcctgataacgcatgcaaggaaatcgaccgcgtactggcggaagtcctcattcagcgtcgtcccggctacctgctgctgtctaccgacgtggctgctgcgccggcggctctgccacaaagcactctttctttgccgaccgccccggatcatcgcgcagttctggctgctttcagcgacgctgctgagcagatgctggctcaggccaaaagcgtctctctactggcggactttctggctgatcgtttcggtgttactcgagcactggccgcgtggcttcagcaggttccgctaccgcacgccactctgttaatgggtaaaggcgttctgagtgaacagcaaccagggttcgtgggtacctacgctggtgcggcatctatcgattcgacgcgtggcgcaatcgaagaagctggggtaattatcggagtgggagttagattttccgacactatcacagcaggcttctcgcagcagatcgacgcccgccgttttatagacattcaacccttcttctctcgtattggcgatcgccagtttgatcacttgccgatgcaggctgccgtcgcagccctgcatcaactgtgtcttcgttatcagcagcagtggtctatcaccgctcctagcccgcctgcactgccgccggctgctggtagcgagctgtcccagaacgcattctggcaggcgatgcagaacttcatccgccctggggacctgttggtggccgaccaaggtactgcggcgttcggcgcagcggcgctgcgcttaccgcagaattgccagctgcttgtgcagccgctgtggggctcaatcggttacagtctgccggccacctttggtgctcagacggcagatacagagcgtcgtgtaatcctaatcattggcgatggttcagcgcaattaactattcaggaactttccagtatgatgcgtgacggcttgaaacctatcatctttctcctgaacaacaacggttacaccgttgaacgggcgattcacggcgcggagcaacgttataacgatatcgctgcttggaattggacccaactgccccaggcgctgagtgttcattgcccagcgcagagctggcgagtcgttgaaacggtgcagctgaccgacgtaatgaaagtcatcgctgcttctccgcgtctgagcttggtagaagttgttctgcctgcaatggatgtcccaccgctgctgcaagcagtgagtgccgctctgaaccagcgcaactcctcttaatccctccctacgggttaaggagcccctgctatgcgcagcatgcagtttgatgagtacggtgcacccctgaaagcgttctcatatgaagacccgaccccgcaagggaaggaagtagtcgttaggatcgaagcctgtggtgtgtgccactctgatattcatcttcacgagggctacttcgacatgggcggtggcaataaagctgatgttactcgtgctcgcgaactcccttttacattgggtcatgaaatcgttggcgaagtggtagcaactggaccaggtgtcaccggcgctaaaccgggcgacaaacgtattgtgtacccgtggatcgggtgcggcgactgcccgaaatgcaacagtggtgaggatcagtcctgtgcgcgtccacgtaacctgggtgttcacgttgacggtggctattcgacgcacgtaaagataccggacgaaaaattcctgttcgcctacgatggtattcctactgagttagcgggaacctatgcttgcagcggcatcaccgcttatggtgcactgatgaaagcaaaggaagcggctgaaagatctggctacatcggtctgattggcgctggtggcgttggcatggctggtctgatgctggccaaagcagcgatcggggctaaaactgtagtctttgatatcgacgacgcaaaactggaagctgcgacccgtgccggggcggattacgtgttcaactccggtgcaaaagaaacacgcaaggaagttatgaaactaacgaatggtggcctgtctggtgctgttgatttcgttggcagcgataaaagcgctctgtttggaatcaacgccttgggtcagaacggcgtgctggtcataattggactgttcggtggcgctatgactgttccggtacccctgttcccgctgaaagggatcaccgtacgtggctcatacgtaggttccctgcaagagatgagtgatatgatggagttagttcgcgctgggaaagttcctccgatgccggtaaaaactcggccactggacgctgcctgggaaacccttgaggatctacgccatggtaaaatcgtgggccgtgttgttctgaccccataagaaggagatatacatatgacccatcaattaagatcgcgcgatatcatcgctctgggctttatgacatttgcgttgttcgtcggcgcaggtaacattattttccctccaatggtcggcttgcaggcaggcgaacacgtctggactgcggcattcggcttcctcattactgccgttggcctaccggtattaacggtagtggcgctggcaaaagttggcggcggtgttgacagtctcagcacgccaattggtaaagtcgctggcgtactgctggcaacagtttgttacctggcggtggggccgctttttgctacgccgcgtacagctaccgtttcttttgaagtgggcattgcgccgctgacgggtgattccgcgctgccgctgtttatttacagcctggtctatttcgctatcgttattctggtttcgctctatccgggcaagctgctggataccgtgggcaacttccttgcgccgctgaaaattatcgcgctggtcatcctgtctgttgccgcaattatctggccggcgggttctatcagtacggcgactgaggcttatcaaaacgctgcgttttctaacggcttcgtcaacggctatctgaccatggatacgctgggcgcaatggtgtttggtatcgttattgttaacgcggcgcgttctcgtggcgttaccgaagcgcgtctgctgacccgttataccgtctgggctggcctgatggcgggtgttggtctgactctgctgtacctggcgctgttccgtctgggttcagacagcgcgtcgctggtcgatcagtctgcaaacggtgcggcgatcctgcatgcttacgttcagcatacctttggcggcggcggtagcttcctgctggcggcgttaatcttcatcgcctgcctggtcacggcggttggcctgacctgtgcttgtgcagaattcttcgcccagtacgtaccgctctcttatcgtacgctggtgtttatcctcggcggcttctcgatggtggtgtctaacctcggcttgagccagctgattcagatctctgtaccggtgctgaccgccatttatccgccgtgtatcgcactggttgtattaagttttacacgctcatggtggcataattcgtcccgcgtgattgctccgccgatgtttatcagcctgctttttggtattctcgacgggatcaaggcatctgcattcagcgatatcttaccgtcctgggcgcagcgtttaccgctggccgaacaaggtctggcgtggttaatgccaacagtggtgatggtggttctggccattatctgggatcgtgcggcaggtcgtcaggtgacctccagcgctcactaatacgcatggcatggatgaccgatggtagtgtgggctctccccatgcgagagtagggaactgccaggcat

SEQ ID NO: 38 - DNA, 5381 bp, Artificial Sequence
  Description of Artificial Sequence: Synthetic polynucleotide
gttgacactctatcattgatagagttattttaccactccctatcagtgatagagaaaagtgaaatattcacgtaaggaggtaatagatgcagatcttcgacactttgcaatcaatgggccatgagcaggttgtcctatgtagcgataagaccacgggtctgcgcgccattatcgctatacacgatacatccttagggccggcgcttggtggtacccgtatgtggcagtatgcaactgacgacgatgctattactgacgcactccgtctgtctcggggcatgacctacaaagctgcggtttctggcgtaaatctgggcggtggtaaagccgttatcatcggaaaccctcacagtgataaaagcgaagcgctgtttcgcgcttacggcagaatggtggaatcccagcgtgggcgttacatcaccgccgaagacgttggtactagcgtacgtgatatggagtggattcgcatggaaaccaaatatgtaacgggcgtgggtggcaacggaggctctggtgacccctctccagttaccgctctgggtgtttactcgggcatgaaggcatgcgctaaatcagtctatggtactgatgcgctgagcggtaaaaggatcgtggttcagggcgcgggtaacgttgcatcccatctggttcacagtctggtaaaagaaggcgctgtggttttcgtcactgacatctacgaagaaaaggccaaagcattagcggctgaaacgggcgctaccgtgattcgcaccgacgaggtttttactacacaatgcgatatcttctctccgaacgctctgggggccgtcctgaacgatgaaactattccgcagctcacatgcgctatcgtagctggtggtgcaaacaatcagcttaaaatcgaacaacgtcacgccacggctctgcaagagaaaggcattctgtatgcgccggattacgtaatcaacgccgggggcctcatgaatgtggcgagcgaagttgacggctacaaccgtgaaaaggttatgcgccaggctgaaggtatttacgatattactatgaacatcctaaataccgcgcgtgagcgtaacatcctgaccatcgaagcatccaacgcgattgctgaagagcggatcaacaaagttcgccatgttcacgggaacttcatcggttccccgtctattcgcggagtataataaatcaaaacaccaaattaaggagaaattttatgtcgacgacaaccgttggtgactacttgctgtatcgcttaaacgaaatcggcattgagcacctcttcggagtgccaggtgattacaatctgcaatttctggatcatgtaatcgaccaccctcagctgacttgggtcggctgcactaacgaacttaacgctgcctacgcagctgatggttatgcgcgttgtcgtccggctgcggcactgctgaccaccttcggggttggcgaactgagcgctattaatggcatcgcaggttcctacgcggagtatctgccggtaatacatatcgttggtgcaccgagtctatcagcccagcagcagggcgacctgattcaccactctcttggcgaaggtgatttttccagcttcctgaggatgtcccaaccggtgtctgttgcgcaggctgctctgactcctgataacgcatgcaaggaaatcgaccgcgtactggcggaagtcctcattcagcgtcgtcccggctacctgctgctgtctaccgacgtggctgctgcgccggcggctctgccacaaagcactctttctttgccgaccgccccggatcatcgcgcagttctggctgctttcagcgacgctgctgagcagatgctggctcaggccaaaagcgtctctctactggcggactttctggctgatcgtttcggtgttactcgagcactggccgcgtggcttcagcaggttccgctaccgcacgccactctgttaatgggtaaaggcgttctgagtgaacagcaaccagggttcgtgggtacctacgctggtgcggcatctatcgattcgacgcgtggcgcaatcgaagaagctggggtaattatcggagtgggagttagattttccgacactatcacagcaggcttctcgcagcagatcgacgcccgccgttttatagacattcaacccttcttctctcgtattggcgatcgccagtttgatcacttgccgatgcaggctgccgtcgcagccctgcatcaactgtgtcttcgttatcagcagcagtggtctatcaccgctcctagcccgcctgcactgccgccggctgctggtagcgagctgtcccagaacgcattctggcaggcgatgcagaacttcatccgccctggggacctgttggtggccgaccaaggtactgcggcgttcggcgcagcggcgctgcgcttaccgcagaattgccagctgcttgtgcagccgctgtggggctcaatcggttacagtctgccggccacctttggtgctcagacggcagatacagagcgtcgtgtaatcctaatcattggcgatggttcagcgcaattaactattcaggaactttccagtatgatgcgtgacggcttgaaacctatcatctttctcctgaacaacaacggttacaccgttgaacgggcgattcacggcgcggagcaacgttataacgatatcgctgcttggaattggacccaactgccccaggcgctgagtgttcattgcccagcgcagagctggcgagtcgttgaaacggtgcagctgaccgacgtaatgaaagtcatcgctgcttctccgcgtctgagcttggtagaagttgttctgcctgcaatggatgtcccaccgctgctgcaagcagtgagtgccgctctgaaccagcgcaactcctcttaaatttttcaacggcctatcataaggaggaataatgacagcggagcagcaaaatggggtatccgactcacgccgtttcgaatttcaggaatttggtggccctatcgccccacagacctatcagctccccgcaccggctagcgatgaagttttgttaaaggtgaactactgcggtgtctgtcacagtgatgttcatcttcacgacggctacttcgagctgggtggcgataaacgtctgaacttcgctatgccgctgccgctgacgctgggtcacgaagtaattggcaccgttgtggctgtcggcgaccaggttactggtgtaaaaccgggggaccagcgactgatctatccgtggataggttgcggaaaatgcggcgcgtgtcaaaaaggagaagaaaacctgtgcgttactcctgcacatctgggcgtgaacaagccgggcggttacgctgatcacatcgttgtaccccattctcgctaccttctggacatttcgggtctgaacccgggtgatgccgctaccctcgcgtgctccggcctgaccactttcagcgcgatcaacaaagtgttgccgcttgcagatgaccagtggattgttgttatcggttgtggtggcctcggccagatggcgctgcgtatcctgcaagctatgggaattggcaatgttatcggtattgacctgtctgaagagaaacggaaactggctcatgaaagcggtgcacgtcactccttcgatccaaacactccgaagctgaaccgcgtggtcgccgaaacctgcccgggtacggtacaggccgcgttagactttgtgggcaatgagcaaactgctcagctggcactgtctctgcttggaaaaggtggcaaatatgttcctgtcgggctgcacggcggcgagctgcgttacccattgccgatcatcacgaacaaagctgtaagtatcatcggttcttacgttggtaccctgaaagaactggaagacttagttgctttcgccaaggaaaagaatctgccgccaattcatattgaacaccgcccgctggaatcggcggctcaggccgtagaggacctggaaaaaggacaggttgctgggcgtgttatcctggatgcaggtaactaagaaggagatatacatatgacccatcaattaagatcgcgcgatatcatcgctctgggctttatgacatttgcgttgttcgtcggcgcaggtaacattattttccctccaatggtcggcttgcaggcaggcgaacacgtctggactgcggcattcggcttcctcattactgccgttggcctaccggtattaacggtagtggcgctggcaaaagttggcggcggtgttgacagtctcagcacgccaattggtaaagtcgctggcgtactgctggcaacagtttgttacctggcggtggggccgctttttgctacgccgcgtacagctaccgtttcttttgaagtgggcattgcgccgctgacgggtgattccgcgctgccgctgtttatttacagcctggtctatttcgctatcgttattctggtttcgctctatccgggcaagctgctggataccgtgggcaacttccttgcgccgctgaaaattatcgcgctggtcatcctgtctgttgccgcaattatctggccggcgggttctatcagtacggcgactgaggcttatcaaaacgctgcgttttctaacggcttcgtcaacggctatctgaccatggatacgctgggcgcaatggtgtttggtatcgttattgttaacgcggcgcgttctcgtggcgttaccgaagcgcgtctgctgacccgttataccgtctgggctggcctgatggcgggtgttggtctgactctgctgtacctggcgctgttccgtctgggttcagacagcgcgtcgctggtcgatcagtctgcaaacggtgcggcgatcctgcatgcttacgttcagcatacctttggcggcggcggtagcttcctgctggcggcgttaatcttcatcgcctgcctggtcacggcggttggcctgacctgtgcttgtgcagaattcttcgcccagtacgtaccgctctcttatcgtacgctggtgtttatcctcggcggcttctcgatggtggtgtctaacctcggcttgagccagctgattcagatctctgtaccggtgctgaccgccatttatccgccgtgtatcgcactggttgtattaagttttacacgctcatggtggcataattcgtcccgcgtgattgctccgccgatgtttatcagcctgctttttggtattctcgacgggatcaaggcatctgcattcagcgatatcttaccgtcctgggcgcagcgtttaccgctggccgaacaaggtctggcgtggttaatgccaacagtggtgatggtggttctggccattatctgggatcgtgcggcaggtcgtcaggtgacctccagcgctcactaatacgcatggcatggatgaccgatggtagtgtgggctctccccatgcgagagtagggaactgccaggcat

SEQ ID NO: 39 - DNA, 5286 bp, Artificial Sequence
  Description of Artificial Sequence: Synthetic polynucleotide
gttgacactctatcattgatagagttattttaccactccctatcagtgatagagaaaagtgaaatattcacgtaaggaggtaatagatgcagatcttcgacactttgcaatcaatgggccatgagcaggttgtcctatgtagcgataagaccacgggtctgcgcgccattatcgctatacacgatacatccttagggccggcgcttggtggtacccgtatgtggcagtatgcaactgacgacgatgctattactgacgcactccgtctgtctcggggcatgacctacaaagctgcggtttctggcgtaaatctgggcggtggtaaagccgttatcatcggaaaccctcacagtgataaaagcgaagcgctgtttcgcgcttacggcagaatggtggaatcccagcgtgggcgttacatcaccgccgaagacgttggtactagcgtacgtgatatggagtggattcgcatggaaaccaaatatgtaacgggcgtgggtggcaacggaggctctggtgacccctctccagttaccgctctgggtgtttactcgggcatgaaggcatgcgctaaatcagtctatggtactgatgcgctgagcggtaaaaggatcgtggttcagggcgcgggtaacgttgcatcccatctggttcacagtctggtaaaagaaggcgctgtggttttcgtcactgacatctacgaagaaaaggccaaagcattagcggctgaaacgggcgctaccgtgattcgcaccgacgaggtttttactacacaatgcgatatcttctctccgaacgctctgggggccgtcctgaacgatgaaactattccgcagctcacatgcgctatcgtagctggtggtgcaaacaatcagcttaaaatcgaacaacgtcacgccacggctctgcaagagaaaggcattctgtatgcgccggattacgtaatcaacgccgggggcctcatgaatgtggcgagcgaagttgacggctacaaccgtgaaaaggttatgcgccaggctgaaggtatttacgatattactatgaacatcctaaataccgcgcgtgagcgtaacatcctgaccatcgaagcatccaacgcgattgctgaagagcggatcaacaaagttcgccatgttcacgggaacttcatcggttccccgtctattcgcggagtataataaatcaaaacaccaaattaaggagaaattttatgtcgacgacaaccgttggtgactacttgctgtatcgcttaaacgaaatcggcattgagcacctcttcggagtgccaggtgattacaatctgcaatttctggatcatgtaatcgaccaccctcagctgacttgggtcggctgcactaacgaacttaacgctgcctacgcagctgatggttatgcgcgttgtcgtccggctgcggcactgctgaccaccttcggggttggcgaactgagcgctattaatggcatcgcaggttcctacgcggagtatctgccggtaatacatatcgttggtgcaccgagtctatcagcccagcagcagggcgacctgattcaccactctcttggcgaaggtgatttttccagcttcctgaggatgtcccaaccggtgtctgttgcgcaggctgctctgactcctgataacgcatgcaaggaaatcgaccgcgtactggcggaagtcctcattcagcgtcgtcccggctacctgctgctgtctaccgacgtggctgctgcgccggcggctctgccacaaagcactctttctttgccgaccgccccggatcatcgcgcagttctggctgctttcagcgacgctgctgagcagatgctggctcaggccaaaagcgtctctctactggcggactttctggctgatcgtttcggtgttactcgagcactggccgcgtggcttcagcaggttccgctaccgcacgccactctgttaatgggtaaaggcgttctgagtgaacagcaaccagggttcgtgggtacctacgctggtgcggcatctatcgattcgacgcgtggcgcaatcgaagaagctggggtaattatcggagtgggagttagattttccgacactatcacagcaggcttctcgcagcagatcgacgcccgccgttttatagacattcaacccttcttctctcgtattggcgatcgccagtttgatcacttgccgatgcaggctgccgtcgcagccctgcatcaactgtgtcttcgttatcagcagcagtggtctatcaccgctcctagcccgcctgcactgccgccggctgctggtagcgagctgtcccagaacgcattctggcaggcgatgcagaacttcatccgccctggggacctgttggtggccgaccaaggtactgcggcgttcggcgcagcggcgctgcgcttaccgcagaattgccagctgcttgtgcagccgctgtggggctcaatcggttacagtctgccggccacctttggtgctcagacggcagatacagagcgtcgtgtaatcctaatcattggcgatggttcagcgcaattaactattcaggaactttccagtatgatgcgtgacggcttgaaacctatcatctttctcctgaacaacaacggttacaccgttgaacgggcgattcacggcgcggagcaacgttataacgatatcgctgcttggaattggacccaactgccccaggcgctgagtgttcattgcccagcgcagagctggcgagtcgttgaaacggtgcagctgaccgacgtaatgaaagtcatcgctgcttctccgcgtctgagcttggtagaagttgttctgcctgcaatggatgtcccaccgctgctgcaagcagtgagtgccgctctgaaccagcgcaactcctcttaattcttaataataaggagctaattatgcagacggcgttcttgtataagccaggtcacgaaaacttagtgcgctcggagatcccgatacctaaagctgggcgtggcgaagtcgttctggaaattaaagccgctggcatgtgccattccgatctgcacgttctcgacggtggaatccccctgccgggtcaatttgtaatgggccatgaaatcgttggtactattcacgagatcggccaggacgtgaccggtttcaaacagggcgatctgtacgcagtccacggcccgaatccgtgtggtatttgcaccctgtgcagagaaggatttgataacgactgcactacagtggcgaaaaccggtcaatggttcggactgggtcttgacggcggctaccagaagtatatccgtatcccgaacgtaaggtctatcgttaaagttccagaaggtgtttcagctgaggcagctgcgagctgtactgatgcagtactgaccccgtaccgtgcactaaaacaggctggcgccagcaactctactcgggtactgattctgggtctgggtggcttaggtctgaatgcccttaaactggctaagaccttcggcagttacgtttacgcatctgacctgaaaccttctgcgcgtgaagctgctaaggccgctggggcggatgaagtgctggagtccctgcccgaagacccgctgggtgttgatatcgtgttagacgtcgttggcgtgcagagcaccttcaacctcgctcaaaaacacgttggcccgcgtggcatcattgtacctgtaggcctggcatccccacagctttcgtttaacctaacggatctggcgctccgcgaaattcgtgttcagggcactttttggggcacgagcaatgagctggctgaatgtctgcgcctgtgccagctgggcctgatcaacccgaaatatactgtggtgcctcttgaagaagcgccgaaatatatggaagcaatggctcatgggaaagtagaaggtcgtatcgttttccacccgtaagaaggagatatacatatgacccatcaattaagatcgcgcgatatcatcgctctgggctttatgacatttgcgttgttcgtcggcgcaggtaacattattttccctccaatggtcggcttgcaggcaggcgaacacgtctggactgcggcattcggcttcctcattactgccgttggcctaccggtattaacggtagtggcgctggcaaaagttggcggcggtgttgacagtctcagcacgccaattggtaaagtcgctggcgtactgctggcaacagtttgttacctggcggtggggccgctttttgctacgccgcgtacagctaccgtttcttttgaagtgggcattgcgccgctgacgggtgattccgcgctgccgctgtttatttacagcctggtctatttcgctatcgttattctggtttcgctctatccgggcaagctgctggataccgtgggcaacttccttgcgccgctgaaaattatcgcgctggtcatcctgtctgttgccgcaattatctggccggcgggttctatcagtacggcgactgaggcttatcaaaacgctgcgttttctaacggcttcgtcaacggctatctgaccatggatacgctgggcgcaatggtgtttggtatcgttattgttaacgcggcgcgttctcgtggcgttaccgaagcgcgtctgctgacccgttataccgtctgggctggcctgatggcgggtgttggtctgactctgctgtacctggcgctgttccgtctgggttcagacagcgcgtcgctggtcgatcagtctgcaaacggtgcggcgatcctgcatgcttacgttcagcatacctttggcggcggcggtagcttcctgctggcggcgttaatcttcatcgcctgcctggtcacggcggttggcctgacctgtgcttgtgcagaattcttcgcccagtacgtaccgctctcttatcgtacgctggtgtttatcctcggcggcttctcgatggtggtgtctaacctcggcttgagccagctgattcagatctctgtaccggtgctgaccgccatttatccgccgtgtatcgcactggttgtattaagttttacacgctcatggtggcataattcgtcccgcgtgattgctccgccgatgtttatcagcctgctttttggtattctcgacgggatcaaggcatctgcattcagcgatatcttaccgtcctgggcgcagcgtttaccgctggccgaacaaggtctggcgtggttaatgccaacagtggtgatggtggttctggccattatctgggatcgtgcggcaggtcgtcaggtgacctccagcgctcactaatacgcatggcatggatgaccgatggtagtgtgggctctccccatgcgagagtagggaactgccaggcat

SEQ ID NO: 40 - DNA, 5364 bp, Artificial Sequence
  Description of Artificial Sequence: Synthetic polynucleotide
gttgacactctatcattgatagagttattttaccactccctatcagtgatagagaaaagtgagataaacgaatcacaaaggcgaggcaagatgaacatcttcaagaaaatggaggaatttaattatgaacaactggtctacttctacgacagcgaaacggaactcaaaggtattacctgtatacacaacacaactttagggccggcattgggcggtacccgcctttggaactataactctgaggaagatgccgttgaagacgtaatccgtctggctcggggcatgacttacaaagcggcttgcgccggtctgaatctgggcggcggtaaaaccgtgctgatcggtgatgctaaaaagattaaatcagagtcctacttccgtggactggggcgctacgttcagtcgctgaacggcagatatatcaccgcggaagacgtaaatacttctacgaaggatatggcatacgttgctatggaaactgactatgtggtaggcctgggaggtaaatccggcaaccctagtccagttactgcttacggtgcatttatgggtatcaaagcggcgctgatgaaaaaatttgaggatagctctattgaaggccgaaccttcgcagtgcagggtgctgggcagacgggttactatcttatcgattacctcctaggcaacaacaagttcaaagaaaaggctaaaaagatttacttcaccgaaattaacgagagctatatcgagcgtatgaacaaagaacatccggaagttgaatttatttccccggacaaaatctactcgctggaagtagacgtcttcgtgccctgcgccctgggcaaaatcgttaatgacaaaactatcgatgaatttaagtgtccgatcatcgcaggtactgcaaacaacgtactggaaagggaagcgcacggcaacatgcttaaagaacgtggcattctttacgccccggactatgtgatcaatgctggtgggctgatcaacgtttaccacgagctgaacggttacaataaagagaacgctattctggaagtggaattaatttatgatcgcctactggaaatattcaacatcgctgattctctgaacatcagcaccaatatcgctgccaacgagttcgcggaaaaacgtatcaagcaaattaagtccttgaaaaacaacttcattaaacgctaagaccattaataaggaacattttatgtcgacgacaaccgttggtgactacttgctgtatcgcttaaacgaaatcggcattgagcacctcttcggagtgccaggtgattacaatctgcaatttctggatcatgtaatcgaccaccctcagctgacttgggtcggctgcactaacgaacttaacgctgcctacgcagctgatggttatgcgcgttgtcgtccggctgcggcactgctgaccaccttcggggttggcgaactgagcgctattaatggcatcgcaggttcctacgcggagtatctgccggtaatacatatcgttggtgcaccgagtctatcagcccagcagcagggcgacctgattcaccactctcttggcgaaggtgatttttccagcttcctgaggatgtcccaaccggtgtctgttgcgcaggctgctctgactcctgataacgcatgcaaggaaatcgaccgcgtactggcggaagtcctcattcagcgtcgtcccggctacctgctgctgtctaccgacgtggctgctgcgccggcggctctgccacaaagcactctttctttgccgaccgccccggatcatcgcgcagttctggctgctttcagcgacgctgctgagcagatgctggctcaggccaaaagcgtctctctactggcggactttctggctgatcgtttcggtgttactcgagcactggccgcgtggcttcagcaggttccgctaccgcacgccactctgttaatgggtaaaggcgttctgagtgaacagcaaccagggttcgtgggtacctacgctggtgcggcatctatcgattcgacgcgtggcgcaatcgaagaagctggggtaattatcggagtgggagttagattttccgacactatcacagcaggcttctcgcagcagatcgacgcccgccgttttatagacattcaacccttcttctctcgtattggcgatcgccagtttgatcacttgccgatgcaggctgccgtcgcagccctgcatcaactgtgtcttcgttatcagcagcagtggtctatcaccgctcctagcccgcctgcactgccgccggctgctggtagcgagctgtcccagaacgcattctggcaggcgatgcagaacttcatccgccctggggacctgttggtggccgaccaaggtactgcggcgttcggcgcagcggcgctgcgcttaccgcagaattgccagctgcttgtgcagccgctgtggggctcaatcggttacagtctgccggccacctttggtgctcagacggcagatacagagcgtcgtgtaatcctaatcattggcgatggttcagcgcaattaactattcaggaactttccagtatgatgcgtgacggcttgaaacctatcatctttctcctgaacaacaacggttacaccgttgaacgggcgattcacggcgcggagcaacgttataacgatatcgctgcttggaattggacccaactgccccaggcgctgagtgttcattgcccagcgcagagctggcgagtcgttgaaacggtgcagctgaccgacgtaatgaaagtcatcgctgcttctccgcgtctgagcttggtagaagttgttctgcctgcaatggatgtcccaccgctgctgcaagcagtgagtgccgctctgaaccagcgcaactcctcttaattggataaagaataaggaggtattttatgacagcggagcagcaaaatggggtatccgactcacgccgtttcgaatttcaggaatttggtggccctatcgccccacagacctatcagctccccgcaccggctagcgatgaagttttgttaaaggtgaactactgcggtgtctgtcacagtgatgttcatcttcacgacggctacttcgagctgggtggcgataaacgtctgaacttcgctatgccgctgccgctgacgctgggtcacgaagtaattggcaccgttgtggctgtcggcgaccaggttactggtgtaaaaccgggggaccagcgactgatctatccgtggataggttgcggaaaatgcggcgcgtgtcaaaaaggagaagaaaacctgtgcgttactcctgcacatctgggcgtgaacaagccgggcggttacgctgatcacatcgttgtaccccattctcgctaccttctggacatttcgggtctgaacccgggtgatgccgctaccctcgcgtgctccggcctgaccactttcagcgcgatcaacaaagtgttgccgcttgcagatgaccagtggattgttgttatcggttgtggtggcctcggccagatggcgctgcgtatcctgcaagctatgggaattggcaatgttatcggtattgacctgtctgaagagaaacggaaactggctcatgaaagcggtgcacgtcactccttcgatccaaacactccgaagctgaaccgcgtggtcgccgaaacctgcccgggtacggtacaggccgcgttagactttgtgggcaatgagcaaactgctcagctggcactgtctctgcttggaaaaggtggcaaatatgttcctgtcgggctgcacggcggcgagctgcgttacccattgccgatcatcacgaacaaagctgtaagtatcatcggttcttacgttggtaccctgaaagaactggaagacttagttgctttcgccaaggaaaagaatctgccgccaattcatattgaacaccgcccgctggaatcggcggctcaggccgtagaggacctggaaaaaggacaggttgctgggcgtgttatcctggatgcaggtaactaagaaggagatatacatatgacccatcaattaagatcgcgcgatatcatcgctctgggctttatgacatttgcgttgttcgtcggcgcaggtaacattattttccctccaatggtcggcttgcaggcaggcgaacacgtctggactgcggcattcggcttcctcattactgccgttggcctaccggtattaacggtagtggcgctggcaaaagttggcggcggtgttgacagtctcagcacgccaattggtaaagtcgctggcgtactgctggcaacagtttgttacctggcggtggggccgctttttgctacgccgcgtacagctaccgtttcttttgaagtgggcattgcgccgctgacgggtgattccgcgctgccgctgtttatttacagcctggtctatttcgctatcgttattctggtttcgctctatccgggcaagctgctggataccgtgggcaacttccttgcgccgctgaaaattatcgcgctggtcatcctgtctgttgccgcaattatctggccggcgggttctatcagtacggcgactgaggcttatcaaaacgctgcgttttctaacggcttcgtcaacggctatctgaccatggatacgctgggcgcaatggtgtttggtatcgttattgttaacgcggcgcgttctcgtggcgttaccgaagcgcgtctgctgacccgttataccgtctgggctggcctgatggcgggtgttggtctgactctgctgtacctggcgctgttccgtctgggttcagacagcgcgtcgctggtcgatcagtctgcaaacggtgcggcgatcctgcatgcttacgttcagcatacctttggcggcggcggtagcttcctgctggcggcgttaatcttcatcgcctgcctggtcacggcggttggcctgacctgtgcttgtgcagaattcttcgcccagtacgtaccgctctcttatcgtacgctggtgtttatcctcggcggcttctcgatggtggtgtctaacctcggcttgagccagctgattcagatctctgtaccggtgctgaccgccatttatccgccgtgtatcgcactggttgtattaagttttacacgctcatggtggcataattcgtcccgcgtgattgctccgccgatgtttatcagcctgctttttggtattctcgacgggatcaaggcatctgcattcagcgatatcttaccgtcctgggcgcagcgtttaccgctggccgaacaaggtctggcgtggttaatgccaacagtggtgatggtggttctggccattatctgggatcgtgcggcaggtcgtcaggtgacctccagcgctcactaatacgcatggcatggatgaccgatggtagtgtgggctctccccatgcgagagtagggaactgccaggcat

SEQ ID NO: 41 - DNA, 5346 bp, Artificial Sequence
  Description of Artificial Sequence: Synthetic polynucleotide
gttgacactctatcattgatagagttattttaccactccctatcagtgatagagaaaagtgagagctagataataaggacggcacaagatgaacatcttcaagaaaatggaggaatttaattatgaacaactggtctacttctacgacagcgaaacggaactcaaaggtattacctgtatacacaacacaactttagggccggcattgggcggtacccgcctttggaactataactctgaggaagatgccgttgaagacgtaatccgtctggctcggggcatgacttacaaagcggcttgcgccggtctgaatctgggcggcggtaaaaccgtgctgatcggtgatgctaaaaagattaaatcagagtcctacttccgtggactggggcgctacgttcagtcgctgaacggcagatatatcaccgcggaagacgtaaatacttctacgaaggatatggcatacgttgctatggaaactgactatgtggtaggcctgggaggtaaatccggcaaccctagtccagttactgcttacggtgcatttatgggtatcaaagcggcgctgatgaaaaaatttgaggatagctctattgaaggccgaaccttcgcagtgcagggtgctgggcagacgggttactatcttatcgattacctcctaggcaacaacaagttcaaagaaaaggctaaaaagatttacttcaccgaaattaacgagagctatatcgagcgtatgaacaaagaacatccggaagttgaatttatttccccggacaaaatctactcgctggaagtagacgtcttcgtgccctgcgccctgggcaaaatcgttaatgacaaaactatcgatgaatttaagtgtccgatcatcgcaggtactgcaaacaacgtactggaaagggaagcgcacggcaacatgcttaaagaacgtggcattctttacgccccggactatgtgatcaatgctggtgggctgatcaacgtttaccacgagctgaacggttacaataaagagaacgctattctggaagtggaattaatttatgatcgcctactggaaatattcaacatcgctgattctctgaacatcagcaccaatatcgctgccaacgagttcgcggaaaaacgtatcaagcaaattaagtccttgaaaaacaacttcattaaacgctaagaccattaataaggaacattttatgtcgacgacaaccgttggtgactacttgctgtatcgcttaaacgaaatcggcattgagcacctcttcggagtgccaggtgattacaatctgcaatttctggatcatgtaatcgaccaccctcagctgacttgggtcggctgcactaacgaacttaacgctgcctacgcagctgatggttatgcgcgttgtcgtccggctgcggcactgctgaccaccttcggggttggcgaactgagcgctattaatggcatcgcaggttcctacgcggagtatctgccggtaatacatatcgttggtgcaccgagtctatcagcccagcagcagggcgacctgattcaccactctcttggcgaaggtgatttttccagcttcctgaggatgtcccaaccggtgtctgttgcgcaggctgctctgactcctgataacgcatgcaaggaaatcgaccgcgtactggcggaagtcctcattcagcgtcgtcccggctacctgctgctgtctaccgacgtggctgctgcgccggcggctctgccacaaagcactctttctttgccgaccgccccggatcatcgcgcagttctggctgctttcagcgacgctgctgagcagatgctggctcaggccaaaagcgtctctctactggcggactttctggctgatcgtttcggtgttactcgagcactggccgcgtggcttcagcaggttccgctaccgcacgccactctgttaatgggtaaaggcgttctgagtgaacagcaaccagggttcgtgggtacctacgctggtgcggcatctatcgattcgacgcgtggcgcaatcgaagaagctggggtaattatcggagtgggagttagattttccgacactatcacagcaggcttctcgcagcagatcgacgcccgccgttttatagacattcaacccttcttctctcgtattggcgatcgccagtttgatcacttgccgatgcaggctgccgtcgcagccctgcatcaactgtgtcttcgttatcagcagcagtggtctatcaccgctcctagcccgcctgcactgccgccggctgctggtagcgagctgtcccagaacgcattctggcaggcgatgcagaacttcatccgccctggggacctgttggtggccgaccaaggtactgcggcgttcggcgcagcggcgctgcgcttaccgcagaattgccagctgcttgtgcagccgctgtggggctcaatcggttacagtctgccggccacctttggtgctcagacggcagatacagagcgtcgtgtaatcctaatcattggcgatggttcagcgcaattaactattcaggaactttccagtatgatgcgtgacggcttgaaacctatcatctttctcctgaacaacaacggttacaccgttgaacgggcgattcacggcgcggagcaacgttataacgatatcgctgcttggaattggacccaactgccccaggcgctgagtgttcattgcccagcgcagagctggcgagtcgttgaaacggtgcagctgaccgacgtaatgaaagtcatcgctgcttctccgcgtctgagcttggtagaagttgttctgcctgcaatggatgtcccaccgctgctgcaagcagtgagtgccgctctgaaccagcgcaactcctcttaatttttaaagtaacacacgagctaagaactaaggaggatttatgcgcagcatgcagtttgatgagtacggtgcacccctgaaagcgttctcatatgaagacccgaccccgcaagggaaggaagtagtcgttaggatcgaagcctgtggtgtgtgccactctgatattcatcttcacgagggctacttcgacatgggcggtggcaataaagctgatgttactcgtgctcgcgaactcccttttacattgggtcatgaaatcgttggcgaagtggtagcaactggaccaggtgtcaccggcgctaaaccgggcgacaaacgtattgtgtacccgtggatcgggtgcggcgactgcccgaaatgcaacagtggtgaggatcagtcctgtgcgcgtccacgtaacctgggtgttcacgttgacggtggctattcgacgcacgtaaagataccggacgaaaaattcctgttcgcctacgatggtattcctactgagttagcgggaacctatgcttgcagcggcatcaccgcttatggtgcactgatgaaagcaaaggaagcggctgaaagatctggctacatcggtctgattggcgctggtggcgttggcatggctggtctgatgctggccaaagcagcgatcggggctaaaactgtagtctttgatatcgacgacgcaaaactggaagctgcgacccgtgccggggcggattacgtgttcaactccggtgcaaaagaaacacgcaaggaagttatgaaactaacgaatggtggcctgtctggtgctgttgatttcgttggcagcgataaaagcgctctgtttggaatcaacgccttgggtcagaacggcgtgctggtcataattggactgttcggtggcgctatgactgttccggtacccctgttcccgctgaaagggatcaccgtacgtggctcatacgtaggttccctgcaagagatgagtgatatgatggagttagttcgcgctgggaaagttcctccgatgccggtaaaaactcggccactggacgctgcctgggaaacccttgaggatctacgccatggtaaaatcgtgggccgtgttgttctgaccccataagaaggagatatacatatgacccatcaattaagatcgcgcgatatcatcgctctgggctttatgacatttgcgttgttcgtcggcgcaggtaacattattttccctccaatggtcggcttgcaggcaggcgaacacgtctggactgcggcattcggcttcctcattactgccgttggcctaccggtattaacggtagtggcgctggcaaaagttggcggcggtgttgacagtctcagcacgccaattggtaaagtcgctggcgtactgctggcaacagtttgttacctggcggtggggccgctttttgctacgccgcgtacagctaccgtttcttttgaagtgggcattgcgccgctgacgggtgattccgcgctgccgctgtttatttacagcctggtctatttcgctatcgttattctggtttcgctctatccgggcaagctgctggataccgtgggcaacttccttgcgccgctgaaaattatcgcgctggtcatcctgtctgttgccgcaattatctggccggcgggttctatcagtacggcgactgaggcttatcaaaacgctgcgttttctaacggcttcgtcaacggctatctgaccatggatacgctgggcgcaatggtgtttggtatcgttattgttaacgcggcgcgttctcgtggcgttaccgaagcgcgtctgctgacccgttataccgtctgggctggcctgatggcgggtgttggtctgactctgctgtacctggcgctgttccgtctgggttcagacagcgcgtcgctggtcgatcagtctgcaaacggtgcggcgatcctgcatgcttacgttcagcatacctttggcggcggcggtagcttcctgctggcggcgttaatcttcatcgcctgcctggtcacggcggttggcctgacctgtgcttgtgcagaattcttcgcccagtacgtaccgctctcttatcgtacgctggtgtttatcctcggcggcttctcgatggtggtgtctaacctcggcttgagccagctgattcagatctctgtaccggtgctgaccgccatttatccgccgtgtatcgcactggttgtattaagttttacacgctcatggtggcataattcgtcccgcgtgattgctccgccgatgtttatcagcctgctttttggtattctcgacgggatcaaggcatctgcattcagcgatatcttaccgtcctgggcgcagcgtttaccgctggccgaacaaggtctggcgtggttaatgccaacagtggtgatggtggttctggccattatctgggatcgtgcggcaggtcgtcaggtgacctccagcgctcactaatacgcatggcatggatgaccgatggtagtgtgggctctccccatgcgagagtagggaactgccaggcat

SEQ ID NO: 42 - DNA, 5362 bp, Artificial Sequence
  Description of Artificial Sequence: Synthetic polynucleotide
gttgacactctatcattgatagagttattttaccactccctatcagtgatagagaaaagtgagagctagataataaggacggcacaagatgaacatcttcaagaaaatggaggaatttaattatgaacaactggtctacttctacgacagcgaaacggaactcaaaggtattacctgtatacacaacacaactttagggccggcattgggcggtacccgcctttggaactataactctgaggaagatgccgttgaagacgtaatccgtctggctcggggcatgacttacaaagcggcttgcgccggtctgaatctgggcggcggtaaaaccgtgctgatcggtgatgctaaaaagattaaatcagagtcctacttccgtggactggggcgctacgttcagtcgctgaacggcagatatatcaccgcggaagacgtaaatacttctacgaaggatatggcatacgttgctatggaaactgactatgtggtaggcctgggaggtaaatccggcaaccctagtccagttactgcttacggtgcatttatgggtatcaaagcggcgctgatgaaaaaatttgaggatagctctattgaaggccgaaccttcgcagtgcagggtgctgggcagacgggttactatcttatcgattacctcctaggcaacaacaagttcaaagaaaaggctaaaaagatttacttcaccgaaattaacgagagctatatcgagcgtatgaacaaagaacatccggaagttgaatttatttccccggacaaaatctactcgctggaagtagacgtcttcgtgccctgcgccctgggcaaaatcgttaatgacaaaactatcgatgaatttaagtgtccgatcatcgcaggtactgcaaacaacgtactggaaagggaagcgcacggcaacatgcttaaagaacgtggcattctttacgccccggactatgtgatcaatgctggtgggctgatcaacgtttaccacgagctgaacggttacaataaagagaacgctattctggaagtggaattaatttatgatcgcctactggaaatattcaacatcgctgattctctgaacatcagcaccaatatcgctgccaacgagttcgcggaaaaacgtatcaagcaaattaagtccttgaaaaacaacttcattaaacgctaagaccattaataaggaacattttatgtcgacgacaaccgttggtgactacttgctgtatcgcttaaacgaaatcggcattgagcacctcttcggagtgccaggtgattacaatctgcaatttctggatcatgtaatcgaccaccctcagctgacttgggtcggctgcactaacgaacttaacgctgcctacgcagctgatggttatgcgcgttgtcgtccggctgcggcactgctgaccaccttcggggttggcgaactgagcgctattaatggcatcgcaggttcctacgcggagtatctgccggtaatacatatcgttggtgcaccgagtctatcagcccagcagcagggcgacctgattcaccactctcttggcgaaggtgatttttccagcttcctgaggatgtcccaaccggtgtctgttgcgcaggctgctctgactcctgataacgcatgcaaggaaatcgaccgcgtactggcggaagtcctcattcagcgtcgtcccggctacctgctgctgtctaccgacgtggctgctgcgccggcggctctgccacaaagcactctttctttgccgaccgccccggatcatcgcgcagttctggctgctttcagcgacgctgctgagcagatgctggctcaggccaaaagcgtctctctactggcggactttctggctgatcgtttcggtgttactcgagcactggccgcgtggcttcagcaggttccgctaccgcacgccactctgttaatgggtaaaggcgttctgagtgaacagcaaccagggttcgtgggtacctacgctggtgcggcatctatcgattcgacgcgtggcgcaatcgaagaagctggggtaattatcggagtgggagttagattttccgacactatcacagcaggcttctcgcagcagatcgacgcccgccgttttatagacattcaacccttcttctctcgtattggcgatcgccagtttgatcacttgccgatgcaggctgccgtcgcagccctgcatcaactgtgtcttcgttatcagcagcagtggtctatcaccgctcctagcccgcctgcactgccgccggctgctggtagcgagctgtcccagaacgcattctggcaggcgatgcagaacttcatccgccctggggacctgttggtggccgaccaaggtactgcggcgttcggcgcagcggcgctgcgcttaccgcagaattgccagctgcttgtgcagccgctgtggggctcaatcggttacagtctgccggccacctttggtgctcagacggcagatacagagcgtcgtgtaatcctaatcattggcgatggttcagcgcaattaactattcaggaactttccagtatgatgcgtgacggcttgaaacctatcatctttctcctgaacaacaacggttacaccgttgaacgggcgattcacggcgcggagcaacgttataacgatatcgctgcttggaattggacccaactgccccaggcgctgagtgttcattgcccagcgcagagctggcgagtcgttgaaacggtgcagctgaccgacgtaatgaaagtcatcgctgcttctccgcgtctgagcttggtagaagttgttctgcctgcaatggatgtcccaccgctgctgcaagcagtgagtgccgctctgaaccagcgcaactcctcttaattggataaagaataaggaggtattttatgacagcggagcagcaaaatggggtatccgactcacgccgtttcgaatttcaggaatttggtggccctatcgccccacagacctatcagctccccgcaccggctagcgatgaagttttgttaaaggtgaactactgcggtgtctgtcacagtgatgttcatcttcacgacggctacttcgagctgggtggcgataaacgtctgaacttcgctatgccgctgccgctgacgctgggtcacgaagtaattggcaccgttgtggctgtcggcgaccaggttactggtgtaaaaccgggggaccagcgactgatctatccgtggataggttgcggaaaatgcggcgcgtgtcaaaaaggagaagaaaacctgtgcgttactcctgcacatctgggcgtgaacaagccgggcggttacgctgatcacatcgttgtaccccattctcgctaccttctggacatttcgggtctgaacccgggtgatgccgctaccctcgcgtgctccggcctgaccactttcagcgcgatcaacaaagtgttgccgcttgcagatgaccagtggattgttgttatcggttgtggtggcctcggccagatggcgctgcgtatcctgcaagctatgggaattggcaatgttatcggtattgacctgtctgaagagaaacggaaactggctcatgaaagcggtgcacgtcactccttcgatccaaacactccgaagctgaaccgcgtggtcgccgaaacctgcccgggtacggtacaggccgcgttagactttgtgggcaatgagcaaactgctcagctggcactgtctctgcttggaaaaggtggcaaatatgttcctgtcgggctgcacggcggcgagctgcgttacccattgccgatcatcacgaacaaagctgtaagtatcatcggttcttacgttggtaccctgaaagaactggaagacttagttgctttcgccaaggaaaagaatctgccgccaattcatattgaacaccgcccgctggaatcggcggctcaggccgtagaggacctggaaaaaggacaggttgctgggcgtgttatcctggatgcaggtaactaagaaggagatatacatatgacccatcaattaagatcgcgcgatatcatcgctctgggctttatgacatttgcgttgttcgtcggcgcaggtaacattattttccctccaatggtcggcttgcaggcaggcgaacacgtctggactgcggcattcggcttcctcattactgccgttggcctaccggtattaacggtagtggcgctggcaaaagttggcggcggtgttgacagtctcagcacgccaattggtaaagtcgctggcgtactgctggcaacagtttgttacctggcggtggggccgctttttgctacgccgcgtacagctaccgtttcttttgaagtgggcattgcgccgctgacgggtgattccgcgctgccgctgtttatttacagcctggtctatttcgctatcgttattctggtttcgctctatccgggcaagctgctggataccgtgggcaacttccttgcgccgctgaaaattatcgcgctggtcatcctgtctgttgccgcaattatctggccggcgggttctatcagtacggcgactgaggcttatcaaaacgctgcgttttctaacggcttcgtcaacggctatctgaccatggatacgctgggcgcaatggtgtttggtatcgttattgttaacgcggcgcgttctcgtggcgttaccgaagcgcgtctgctgacccgttataccgtctgggctggcctgatggcgggtgttggtctgactctgctgtacctggcgctgttccgtctgggttcagacagcgcgtcgctggtcgatcagtctgcaaacggtgcggcgatcctgcatgcttacgttcagcatacctttggcggcggcggtagcttcctgctggcggcgttaatcttcatcgcctgcctggtcacggcggttggcctgacctgtgcttgtgcagaattcttcgcccagtacgtaccgctctcttatcgtacgctggtgtttatcctcggcggcttctcgatggtggtgtctaacctcggcttgagccagctgattcagatctctgtaccggtgctgaccgccatttatccgccgtgtatcgcactggttgtattaagttttacacgctcatggtggcataattcgtcccgcgtgattgctccgccgatgtttatcagcctgctttttggtattctcgacgggatcaaggcatctgcattcagcgatatcttaccgtcctgggcgcagcgtttaccgctggccgaacaaggtctggcgtggttaatgccaacagtggtgatggtggttctggccattatctgggatcgtgcggcaggtcgtcaggtgacctccagcgctcactaatacgcatggcatggatgaccgatggtagtgtgggctctccccatgcgagagtagggaactgccaggcat

SEQ ID NO: 43 - DNA, 5370 bp, Artificial Sequence
  Description of Artificial Sequence: Synthetic polynucleotide
gttgacactctatcattgatagagttattttaccactccctatcagtgatagagaaaagtgaaaacaggccaaacgtaggctccggaatttaaggaggtattattatggtagagatccaggctttgccggaaacttccatttttgggcaaatcgcagaccaccagcatgaacaggtggtcttctgccacgatcacgaaaccggcctccgtgcgataatcggtattcataacacggttcttggccccgccttaggtggaactcgcatgtggcactatgctaccgaggcagaagcgctgaatgacgttctgcgtctgtctcgcggtatgacctacaaggctgctatctcgggcctgaacctgggtggcggtaaagcagtaatcattggggatgccaaaacaatcaaaaccgaagcgctgctgcggaaattcggcagattcgtgcagaacctgaatggtaaatacatcactgctgaagacgttaacatgactacaaaggatatggagtacattaggatggaaaccaaacacgtcgctggcttacctgaaagtatgggtggaagcggtgacccgtcaccggtaactgcatatggtacgtacatgggcatgaaagcggcggccaaaaaggcgtttggctctgattccctggctggcaaacgtatcgctgttcaaggtgtgggtcatgttggcacttatctgcttgagcatttgaccaaagaaggtgctcagattgtgctgactgactactataaggaacgtgccgaggaagcaggcgcgcgttttggcgcacaggttgttggcctggacgatatctacgatcaagaggtcgacatttactctccatgtgctctcggtgctaccatcaacgatgacactatcgatcgcctgcgttgcgctgttgtagccggttgcgcaaacaaccagctgaaagaagaaaacgtccacggtccggcgctggttgagcgcgggatagtatacgccccagacttcctgatcaatgcagggggcctgattaacgtgtatagcgaagttacagggtctacccgtcagggggctttaactcagaccgaaaaaatctatgactacacactccaagttctggaaaaagccgcggctgaaggtctgcacccgcagcaggctgcgatccgtcaggcggaacaacgcatcgctgcaattggtaaggtgaaaagcacctactaatgagaaataaggaggatttcatgtcgacgacaaccgttggtgactacttgctgtatcgcttaaacgaaatcggcattgagcacctcttcggagtgccaggtgattacaatctgcaatttctggatcatgtaatcgaccaccctcagctgacttgggtcggctgcactaacgaacttaacgctgcctacgcagctgatggttatgcgcgttgtcgtccggctgcggcactgctgaccaccttcggggttggcgaactgagcgctattaatggcatcgcaggttcctacgcggagtatctgccggtaatacatatcgttggtgcaccgagtctatcagcccagcagcagggcgacctgattcaccactctcttggcgaaggtgatttttccagcttcctgaggatgtcccaaccggtgtctgttgcgcaggctgctctgactcctgataacgcatgcaaggaaatcgaccgcgtactggcggaagtcctcattcagcgtcgtcccggctacctgctgctgtctaccgacgtggctgctgcgccggcggctctgccacaaagcactctttctttgccgaccgccccggatcatcgcgcagttctggctgctttcagcgacgctgctgagcagatgctggctcaggccaaaagcgtctctctactggcggactttctggctgatcgtttcggtgttactcgagcactggccgcgtggcttcagcaggttccgctaccgcacgccactctgttaatgggtaaaggcgttctgagtgaacagcaaccagggttcgtgggtacctacgctggtgcggcatctatcgattcgacgcgtggcgcaatcgaagaagctggggtaattatcggagtgggagttagattttccgacactatcacagcaggcttctcgcagcagatcgacgcccgccgttttatagacattcaacccttcttctctcgtattggcgatcgccagtttgatcacttgccgatgcaggctgccgtcgcagccctgcatcaactgtgtcttcgttatcagcagcagtggtctatcaccgctcctagcccgcctgcactgccgccggctgctggtagcgagctgtcccagaacgcattctggcaggcgatgcagaacttcatccgccctggggacctgttggtggccgaccaaggtactgcggcgttcggcgcagcggcgctgcgcttaccgcagaattgccagctgcttgtgcagccgctgtggggctcaatcggttacagtctgccggccacctttggtgctcagacggcagatacagagcgtcgtgtaatcctaatcattggcgatggttcagcgcaattaactattcaggaactttccagtatgatgcgtgacggcttgaaacctatcatctttctcctgaacaacaacggttacaccgttgaacgggcgattcacggcgcggagcaacgttataacgatatcgctgcttggaattggacccaactgccccaggcgctgagtgttcattgcccagcgcagagctggcgagtcgttgaaacggtgcagctgaccgacgtaatgaaagtcatcgctgcttctccgcgtctgagcttggtagaagttgttctgcctgcaatggatgtcccaccgctgctgcaagcagtgagtgccgctctgaaccagcgcaactcctcttaatttttaaagtaacacacgagctaagaactaaggaggatttatgcgcagcatgcagtttgatgagtacggtgcacccctgaaagcgttctcatatgaagacccgaccccgcaagggaaggaagtagtcgttaggatcgaagcctgtggtgtgtgccactctgatattcatcttcacgagggctacttcgacatgggcggtggcaataaagctgatgttactcgtgctcgcgaactcccttttacattgggtcatgaaatcgttggcgaagtggtagcaactggaccaggtgtcaccggcgctaaaccgggcgacaaacgtattgtgtacccgtggatcgggtgcggcgactgcccgaaatgcaacagtggtgaggatcagtcctgtgcgcgtccacgtaacctgggtgttcacgttgacggtggctattcgacgcacgtaaagataccggacgaaaaattcctgttcgcctacgatggtattcctactgagttagcgggaacctatgcttgcagcggcatcaccgcttatggtgcactgatgaaagcaaaggaagcggctgaaagatctggctacatcggtctgattggcgctggtggcgttggcatggctggtctgatgctggccaaagcagcgatcggggctaaaactgtagtctttgatatcgacgacgcaaaactggaagctgcgacccgtgccggggcggattacgtgttcaactccggtgcaaaagaaacacgcaaggaagttatgaaactaacgaatggtggcctgtctggtgctgttgatttcgttggcagcgataaaagcgctctgtttggaatcaacgccttgggtcagaacggcgtgctggtcataattggactgttcggtggcgctatgactgttccggtacccctgttcccgctgaaagggatcaccgtacgtggctcatacgtaggttccctgcaagagatgagtgatatgatggagttagttcgcgctgggaaagttcctccgatgccggtaaaaactcggccactggacgctgcctgggaaacccttgaggatctacgccatggtaaaatcgtgggccgtgttgttctgaccccataagaaggagatatacatatgacccatcaattaagatcgcgcgatatcatcgctctgggctttatgacatttgcgttgttcgtcggcgcaggtaacattattttccctccaatggtcggcttgcaggcaggcgaacacgtctggactgcggcattcggcttcctcattactgccgttggcctaccggtattaacggtagtggcgctggcaaaagttggcggcggtgttgacagtctcagcacgccaattggtaaagtcgctggcgtactgctggcaacagtttgttacctggcggtggggccgctttttgctacgccgcgtacagctaccgtttcttttgaagtgggcattgcgccgctgacgggtgattccgcgctgccgctgtttatttacagcctggtctatttcgctatcgttattctggtttcgctctatccgggcaagctgctggataccgtgggcaacttccttgcgccgctgaaaattatcgcgctggtcatcctgtctgttgccgcaattatctggccggcgggttctatcagtacggcgactgaggcttatcaaaacgctgcgttttctaacggcttcgtcaacggctatctgaccatggatacgctgggcgcaatggtgtttggtatcgttattgttaacgcggcgcgttctcgtggcgttaccgaagcgcgtctgctgacccgttataccgtctgggctggcctgatggcgggtgttggtctgactctgctgtacctggcgctgttccgtctgggttcagacagcgcgtcgctggtcgatcagtctgcaaacggtgcggcgatcctgcatgcttacgttcagcatacctttggcggcggcggtagcttcctgctggcggcgttaatcttcatcgcctgcctggtcacggcggttggcctgacctgtgcttgtgcagaattcttcgcccagtacgtaccgctctcttatcgtacgctggtgtttatcctcggcggcttctcgatggtggtgtctaacctcggcttgagccagctgattcagatctctgtaccggtgctgaccgccatttatccgccgtgtatcgcactggttgtattaagttttacacgctcatggtggcataattcgtcccgcgtgattgctccgccgatgtttatcagcctgctttttggtattctcgacgggatcaaggcatctgcattcagcgatatcttaccgtcctgggcgcagcgtttaccgctggccgaacaaggtctggcgtggttaatgccaacagtggtgatggtggttctggccattatctgggatcgtgcggcaggtcgtcaggtgacctccagcgctcactaatacgcatggcatggatgaccgatggtagtgtgggctctccccatgcgagagtagggaactgccaggcat

SEQ ID NO: 44 - DNA, 5386 bp, Artificial Sequence
  Description of Artificial Sequence: Synthetic polynucleotide
gttgacactctatcattgatagagttattttaccactccctatcagtgatagagaaaagtgaaaacaggccaaacgtaggctccggaatttaaggaggtattattatggtagagatccaggctttgccggaaacttccatttttgggcaaatcgcagaccaccagcatgaacaggtggtcttctgccacgatcacgaaaccggcctccgtgcgataatcggtattcataacacggttcttggccccgccttaggtggaactcgcatgtggcactatgctaccgaggcagaagcgctgaatgacgttctgcgtctgtctcgcggtatgacctacaaggctgctatctcgggcctgaacctgggtggcggtaaagcagtaatcattggggatgccaaaacaatcaaaaccgaagcgctgctgcggaaattcggcagattcgtgcagaacctgaatggtaaatacatcactgctgaagacgttaacatgactacaaaggatatggagtacattaggatggaaaccaaacacgtcgctggcttacctgaaagtatgggtggaagcggtgacccgtcaccggtaactgcatatggtacgtacatgggcatgaaagcggcggccaaaaaggcgtttggctctgattccctggctggcaaacgtatcgctgttcaaggtgtgggtcatgttggcacttatctgcttgagcatttgaccaaagaaggtgctcagattgtgctgactgactactataaggaacgtgccgaggaagcaggcgcgcgttttggcgcacaggttgttggcctggacgatatctacgatcaagaggtcgacatttactctccatgtgctctcggtgctaccatcaacgatgacactatcgatcgcctgcgttgcgctgttgtagccggttgcgcaaacaaccagctgaaagaagaaaacgtccacggtccggcgctggttgagcgcgggatagtatacgccccagacttcctgatcaatgcagggggcctgattaacgtgtatagcgaagttacagggtctacccgtcagggggctttaactcagaccgaaaaaatctatgactacacactccaagttctggaaaaagccgcggctgaaggtctgcacccgcagcaggctgcgatccgtcaggcggaacaacgcatcgctgcaattggtaaggtgaaaagcacctactaatgagaaataaggaggatttcatgtcgacgacaaccgttggtgactacttgctgtatcgcttaaacgaaatcggcattgagcacctcttcggagtgccaggtgattacaatctgcaatttctggatcatgtaatcgaccaccctcagctgacttgggtcggctgcactaacgaacttaacgctgcctacgcagctgatggttatgcgcgttgtcgtccggctgcggcactgctgaccaccttcggggttggcgaactgagcgctattaatggcatcgcaggttcctacgcggagtatctgccggtaatacatatcgttggtgcaccgagtctatcagcccagcagcagggcgacctgattcaccactctcttggcgaaggtgatttttccagcttcctgaggatgtcccaaccggtgtctgttgcgcaggctgctctgactcctgataacgcatgcaaggaaatcgaccgcgtactggcggaagtcctcattcagcgtcgtcccggctacctgctgctgtctaccgacgtggctgctgcgccggcggctctgccacaaagcactctttctttgccgaccgccccggatcatcgcgcagttctggctgctttcagcgacgctgctgagcagatgctggctcaggccaaaagcgtctctctactggcggactttctggctgatcgtttcggtgttactcgagcactggccgcgtggcttcagcaggttccgctaccgcacgccactctgttaatgggtaaaggcgttctgagtgaacagcaaccagggttcgtgggtacctacgctggtgcggcatctatcgattcgacgcgtggcgcaatcgaagaagctggggtaattatcggagtgggagttagattttccgacactatcacagcaggcttctcgcagcagatcgacgcccgccgttttatagacattcaacccttcttctctcgtattggcgatcgccagtttgatcacttgccgatgcaggctgccgtcgcagccctgcatcaactgtgtcttcgttatcagcagcagtggtctatcaccgctcctagcccgcctgcactgccgccggctgctggtagcgagctgtcccagaacgcattctggcaggcgatgcagaacttcatccgccctggggacctgttggtggccgaccaaggtactgcggcgttcggcgcagcggcgctgcgcttaccgcagaattgccagctgcttgtgcagccgctgtggggctcaatcggttacagtctgccggccacctttggtgctcagacggcagatacagagcgtcgtgtaatcctaatcattggcgatggttcagcgcaattaactattcaggaactttccagtatgatgcgtgacggcttgaaacctatcatctttctcctgaacaacaacggttacaccgttgaacgggcgattcacggcgcggagcaacgttataacgatatcgctgcttggaattggacccaactgccccaggcgctgagtgttcattgcccagcgcagagctggcgagtcgttgaaacggtgcagctgaccgacgtaatgaaagtcatcgctgcttctccgcgtctgagcttggtagaagttgttctgcctgcaatggatgtcccaccgctgctgcaagcagtgagtgccgctctgaaccagcgcaactcctcttaattggataaagaataaggaggtattttatgacagcggagcagcaaaatggggtatccgactcacgccgtttcgaatttcaggaatttggtggccctatcgccccacagacctatcagctccccgcaccggctagcgatgaagttttgttaaaggtgaactactgcggtgtctgtcacagtgatgttcatcttcacgacggctacttcgagctgggtggcgataaacgtctgaacttcgctatgccgctgccgctgacgctgggtcacgaagtaattggcaccgttgtggctgtcggcgaccaggttactggtgtaaaaccgggggaccagcgactgatctatccgtggataggttgcggaaaatgcggcgcgtgtcaaaaaggagaagaaaacctgtgcgttactcctgcacatctgggcgtgaacaagccgggcggttacgctgatcacatcgttgtaccccattctcgctaccttctggacatttcgggtctgaacccgggtgatgccgctaccctcgcgtgctccggcctgaccactttcagcgcgatcaacaaagtgttgccgcttgcagatgaccagtggattgttgttatcggttgtggtggcctcggccagatggcgctgcgtatcctgcaagctatgggaattggcaatgttatcggtattgacctgtctgaagagaaacggaaactggctcatgaaagcggtgcacgtcactccttcgatccaaacactccgaagctgaaccgcgtggtcgccgaaacctgcccgggtacggtacaggccgcgttagactttgtgggcaatgagcaaactgctcagctggcactgtctctgcttggaaaaggtggcaaatatgttcctgtcgggctgcacggcggcgagctgcgttacccattgccgatcatcacgaacaaagctgtaagtatcatcggttcttacgttggtaccctgaaagaactggaagacttagttgctttcgccaaggaaaagaatctgccgccaattcatattgaacaccgcccgctggaatcggcggctcaggccgtagaggacctggaaaaaggacaggttgctgggcgtgttatcctggatgcaggtaactaagaaggagatatacatatgacccatcaattaagatcgcgcgatatcatcgctctgggctttatgacatttgcgttgttcgtcggcgcaggtaacattattttccctccaatggtcggcttgcaggcaggcgaacacgtctggactgcggcattcggcttcctcattactgccgttggcctaccggtattaacggtagtggcgctggcaaaagttggcggcggtgttgacagtctcagcacgccaattggtaaagtcgctggcgtactgctggcaacagtttgttacctggcggtggggccgctttttgctacgccgcgtacagctaccgtttcttttgaagtgggcattgcgccgctgacgggtgattccgcgctgccgctgtttatttacagcctggtctatttcgctatcgttattctggtttcgctctatccgggcaagctgctggataccgtgggcaacttccttgcgccgctgaaaattatcgcgctggtcatcctgtctgttgccgcaattatctggccggcgggttctatcagtacggcgactgaggcttatcaaaacgctgcgttttctaacggcttcgtcaacggctatctgaccatggatacgctgggcgcaatggtgtttggtatcgttattgttaacgcggcgcgttctcgtggcgttaccgaagcgcgtctgctgacccgttataccgtctgggctggcctgatggcgggtgttggtctgactctgctgtacctggcgctgttccgtctgggttcagacagcgcgtcgctggtcgatcagtctgcaaacggtgcggcgatcctgcatgcttacgttcagcatacctttggcggcggcggtagcttcctgctggcggcgttaatcttcatcgcctgcctggtcacggcggttggcctgacctgtgcttgtgcagaattcttcgcccagtacgtaccgctctcttatcgtacgctggtgtttatcctcggcggcttctcgatggtggtgtctaacctcggcttgagccagctgattcagatctctgtaccggtgctgaccgccatttatccgccgtgtatcgcactggttgtattaagttttacacgctcatggtggcataattcgtcccgcgtgattgctccgccgatgtttatcagcctgctttttggtattctcgacgggatcaaggcatctgcattcagcgatatcttaccgtcctgggcgcagcgtttaccgctggccgaacaaggtctggcgtggttaatgccaacagtggtgatggtggttctggccattatctgggatcgtgcggcaggtcgtcaggtgacctccagcgctcactaatacgcatggcatggatgaccgatggtagtgtgggctctccccatgcgagagtagggaactgccaggcat

SEQ ID NO: 45 - DNA, 5329 bp, Artificial Sequence
  Description of Artificial Sequence: Synthetic polynucleotide
gttgacactctatcattgatagagttattttaccactccctatcagtgatagagaaaagtgaactacagtatataaggagggtaatatgatcttcgagacaatttctacgtcgaatcacgaagaagttgtgtattgccataacaaggacgccggcttgaaagcaatcatcgcgattcacaacactgtactcggtccggctctgggtggcactcgcatgtggccctacgctagcgaagaggaagcactgaaagatgtccttcgtttatcccgtgggatgacctacaaagctgcggtttcaggtctaaacctgggcggcggtaaagctgtgatctggggtgatccgaataaagacaagtctgaagcgctgtttagagccttcggacggtttgtaaacagcctgggcggacgctacattaccgcggaggacgttggcattgatgttaacgacatggaatatgtgctgcgtgaaactgattacgtcaccggtgtacatcaggttcacggtgggagtggtgatccttctccattcaccgcatatggcactctgcaaggcctgatggccgctctgcaagtgaaattcggtaacgaagacgtaggcaattacagctacgctgttcagggtgtgggtcacgttggcatggaatttgttaaactgctgcgtgagcgcggtgcaaaggttttcgtcactgacatcaacaaagatgcggtccagcgtgctgtggacgaatttggttgtgaggcagtagccctggatgaaatctatgacgttgattgcgacgtgtactccccgaccgctctgggcggcaccgtgaacgataaaactttaccgcgtctgaaatgtaaggtaatctgcggtgcggcaaacaaccagttagctaatgatgagataggcgtggaactggaaaagaaaggcatcctctatgctccggactacgcggtcaacgcgggtgggctgatgaacgttagcctggaaatcgatggatacaaccgcgaacgtgcgatgcgtatgatgcgtaccatttattacaatttgggtcgcattttcgaaatctctaagcgcgacggcatccctacattccgagccgccgatcgtatggctgaagaacgcataacggccatcggtaaactgcgtttaccgcatttgggcgctgcggcaccgcgcttccagggccgacgtggcaactaacagaaatagtaaaggaggtttttaatgtcggagatcacattgggtagataccttttcgaacgcttaaaccaactgcaagtgcagactatttttgggctgcccggcgacttcaatctgtccctgctggataagatctatgaagttgatggcatgcgttgggcaggtaacgctaacgaactcaacgccgcttacgcggctgacggttatagccgtgtcaaaggcctcgcatgtctggttaccacttttggtgtaggcgagctaagtgcgctgaatggtgtgggtggcgcttacgcagaacacgttgggctgctgcatgtagtgggcgtcccatcaatctctagccaggcgaaacagctgctgctgcaccataccctgggtaacggagatttcacggttttccaccgcatgtccaacaacatttctcagaccacggcttttatcagcgacattaattctgctcctggtgaaatcgataggtgcatccgtgaggcctgggtacatcagcgtccggtttacgtcggcctgccggcgaacctagttgacctgactgtgccggcgtctctgttagacactccgatcgatctgtccttgaaaaagaacgacccggatgcccaggaagaagttattgaaaccgtccttgatctggtagacaagtctaaaaaccctataatcttagttgacgcatgcgctagccgtcactcatgccgcgatgaagtacgccggttggtggactccaccagcttcccggttttcgttactccaatgggtaaatctgctgtaaatgagagtcacccgcgttttggcggtgtttacgtgggcagcctcagcgagccaaacgtaaaagaagccgttgaaaacgctgacctggtgctgtccataggcgccctgttgagcgacttcaacactggatcgttctcttattcctacaaaactaagaacattgttgaatttcactctgattataccaaaatccgtcaagcaacgttcccgggtgttcagatgaaagaagcactgaatgtcctgttggaaaaaatcccgagccatgtcgctaactacaaacctctgccggttccgcagcgtcgcgttattccgagcccaggggataaggctgcgatctctcaggagtggctgtggtcgcgtctgtctagctggttccgcgagggcgacatcgtcattacagaaaccggtaccagtgcgtttggaattgtacagtcctatttcccagataactgcatcggcatcagtcaggtgctgtggggttcgatcggcttcaccgtaggtgcaacgctgggcgcggtgatggctgcacaagaaatcgatccgaaaaaacgtgtgattttatttgtcggtgacggttctctgcaacttactgtacaggaaatttctaccatggttaagtgggaaaccactccctacctgtttgtgctgaacaacgatgggtacactatcgaacgccttatccatggcgagactgctacgtataacgatattcagccgtgggataatctgggtctgttgccgctgttcaaagctcgtgactacgaaaccaaccgagttgcgactgtaggcgaaattgaagcgctattcaacaattcagctttcaatgagaatacaaagatccgtatggtggaggtcatgctgccgcggatggatgcaccacagaacctggttaaacaggctgaattttcctccaagaccaacagcgaaaactaaacaaggcacggaaaaattggaggagaaagatgcagacggcgttcttgtataagccaggtcacgaaaacttagtgcgctcggagatcccgatacctaaagctgggcgtggcgaagtcgttctggaaattaaagccgctggcatgtgccattccgatctgcacgttctcgacggtggaatccccctgccgggtcaatttgtaatgggccatgaaatcgttggtactattcacgagatcggccaggacgtgaccggtttcaaacagggcgatctgtacgcagtccacggcccgaatccgtgtggtatttgcaccctgtgcagagaaggatttgataacgactgcactacagtggcgaaaaccggtcaatggttcggactgggtcttgacggcggctaccagaagtatatccgtatcccgaacgtaaggtctatcgttaaagttccagaaggtgtttcagctgaggcagctgcgagctgtactgatgcagtactgaccccgtaccgtgcactaaaacaggctggcgccagcaactctactcgggtactgattctgggtctgggtggcttaggtctgaatgcccttaaactggctaagaccttcggcagttacgtttacgcatctgacctgaaaccttctgcgcgtgaagctgctaaggccgctggggcggatgaagtgctggagtccctgcccgaagacccgctgggtgttgatatcgtgttagacgtcgttggcgtgcagagcaccttcaacctcgctcaaaaacacgttggcccgcgtggcatcattgtacctgtaggcctggcatccccacagctttcgtttaacctaacggatctggcgctccgcgaaattcgtgttcagggcactttttggggcacgagcaatgagctggctgaatgtctgcgcctgtgccagctgggcctgatcaacccgaaatatactgtggtgcctcttgaagaagcgccgaaatatatggaagcaatggctcatgggaaagtagaaggtcgtatcgttttccacccgtaagaaggagatatacatatgacccatcaattaagatcgcgcgatatcatcgctctgggctttatgacatttgcgttgttcgtcggcgcaggtaacattattttccctccaatggtcggcttgcaggcaggcgaacacgtctggactgcggcattcggcttcctcattactgccgttggcctaccggtattaacggtagtggcgctggcaaaagttggcggcggtgttgacagtctcagcacgccaattggtaaagtcgctggcgtactgctggcaacagtttgttacctggcggtggggccgctttttgctacgccgcgtacagctaccgtttcttttgaagtgggcattgcgccgctgacgggtgattccgcgctgccgctgtttatttacagcctggtctatttcgctatcgttattctggtttcgctctatccgggcaagctgctggataccgtgggcaacttccttgcgccgctgaaaattatcgcgctggtcatcctgtctgttgccgcaattatctggccggcgggttctatcagtacggcgactgaggcttatcaaaacgctgcgttttctaacggcttcgtcaacggctatctgaccatggatacgctgggcgcaatggtgtttggtatcgttattgttaacgcggcgcgttctcgtggcgttaccgaagcgcgtctgctgacccgttataccgtctgggctggcctgatggcgggtgttggtctgactctgctgtacctggcgctgttccgtctgggttcagacagcgcgtcgctggtcgatcagtctgcaaacggtgcggcgatcctgcatgcttacgttcagcatacctttggcggcggcggtagcttcctgctggcggcgttaatcttcatcgcctgcctggtcacggcggttggcctgacctgtgcttgtgcagaattcttcgcccagtacgtaccgctctcttatcgtacgctggtgtttatcctcggcggcttctcgatggtggtgtctaacctcggcttgagccagctgattcagatctctgtaccggtgctgaccgccatttatccgccgtgtatcgcactggttgtattaagttttacacgctcatggtggcataattcgtcccgcgtgattgctccgccgatgtttatcagcctgctttttggtattctcgacgggatcaaggcatctgcattcagcgatatcttaccgtcctgggcgcagcgtttaccgctggccgaacaaggtctggcgtggttaatgccaacagtggtgatggtggttctggccattatctgggatcgtgcggcaggtcgtcaggtgacctccagcgctcactaatacgcatggcatggatgaccgatggtagtgtgggctctccccatgcgagagtagggaactgccaggcat

SEQ ID NO: 46 - DNA, 5369 bp, Artificial Sequence
  Description of Artificial Sequence: Synthetic polynucleotide
gttgacactctatcattgatagagttattttaccactccctatcagtgatagagaaaagtgaactacagtatataaggagggtaatatgatcttcgagacaatttctacgtcgaatcacgaagaagttgtgtattgccataacaaggacgccggcttgaaagcaatcatcgcgattcacaacactgtactcggtccggctctgggtggcactcgcatgtggccctacgctagcgaagaggaagcactgaaagatgtccttcgtttatcccgtgggatgacctacaaagctgcggtttcaggtctaaacctgggcggcggtaaagctgtgatctggggtgatccgaataaagacaagtctgaagcgctgtttagagccttcggacggtttgtaaacagcctgggcggacgctacattaccgcggaggacgttggcattgatgttaacgacatggaatatgtgctgcgtgaaactgattacgtcaccggtgtacatcaggttcacggtgggagtggtgatccttctccattcaccgcatatggcactctgcaaggcctgatggccgctctgcaagtgaaattcggtaacgaagacgtaggcaattacagctacgctgttcagggtgtgggtcacgttggcatggaatttgttaaactgctgcgtgagcgcggtgcaaaggttttcgtcactgacatcaacaaagatgcggtccagcgtgctgtggacgaatttggttgtgaggcagtagccctggatgaaatctatgacgttgattgcgacgtgtactccccgaccgctctgggcggcaccgtgaacgataaaactttaccgcgtctgaaatgtaaggtaatctgcggtgcggcaaacaaccagttagctaatgatgagataggcgtggaactggaaaagaaaggcatcctctatgctccggactacgcggtcaacgcgggtgggctgatgaacgttagcctggaaatcgatggatacaaccgcgaacgtgcgatgcgtatgatgcgtaccatttattacaatttgggtcgcattttcgaaatctctaagcgcgacggcatccctacattccgagccgccgatcgtatggctgaagaacgcataacggccatcggtaaactgcgtttaccgcatttgggcgctgcggcaccgcgcttccagggccgacgtggcaactaaaattcactttaacaactaaggggcgaagaatgtcgacgacaaccgttggtgactacttgctgtatcgcttaaacgaaatcggcattgagcacctcttcggagtgccaggtgattacaatctgcaatttctggatcatgtaatcgaccaccctcagctgacttgggtcggctgcactaacgaacttaacgctgcctacgcagctgatggttatgcgcgttgtcgtccggctgcggcactgctgaccaccttcggggttggcgaactgagcgctattaatggcatcgcaggttcctacgcggagtatctgccggtaatacatatcgttggtgcaccgagtctatcagcccagcagcagggcgacctgattcaccactctcttggcgaaggtgatttttccagcttcctgaggatgtcccaaccggtgtctgttgcgcaggctgctctgactcctgataacgcatgcaaggaaatcgaccgcgtactggcggaagtcctcattcagcgtcgtcccggctacctgctgctgtctaccgacgtggctgctgcgccggcggctctgccacaaagcactctttctttgccgaccgccccggatcatcgcgcagttctggctgctttcagcgacgctgctgagcagatgctggctcaggccaaaagcgtctctctactggcggactttctggctgatcgtttcggtgttactcgagcactggccgcgtggcttcagcaggttccgctaccgcacgccactctgttaatgggtaaaggcgttctgagtgaacagcaaccagggttcgtgggtacctacgctggtgcggcatctatcgattcgacgcgtggcgcaatcgaagaagctggggtaattatcggagtgggagttagattttccgacactatcacagcaggcttctcgcagcagatcgacgcccgccgttttatagacattcaacccttcttctctcgtattggcgatcgccagtttgatcacttgccgatgcaggctgccgtcgcagccctgcatcaactgtgtcttcgttatcagcagcagtggtctatcaccgctcctagcccgcctgcactgccgccggctgctggtagcgagctgtcccagaacgcattctggcaggcgatgcagaacttcatccgccctggggacctgttggtggccgaccaaggtactgcggcgttcggcgcagcggcgctgcgcttaccgcagaattgccagctgcttgtgcagccgctgtggggctcaatcggttacagtctgccggccacctttggtgctcagacggcagatacagagcgtcgtgtaatcctaatcattggcgatggttcagcgcaattaactattcaggaactttccagtatgatgcgtgacggcttgaaacctatcatctttctcctgaacaacaacggttacaccgttgaacgggcgattcacggcgcggagcaacgttataacgatatcgctgcttggaattggacccaactgccccaggcgctgagtgttcattgcccagcgcagagctggcgagtcgttgaaacggtgcagctgaccgacgtaatgaaagtcatcgctgcttctccgcgtctgagcttggtagaagttgttctgcctgcaatggatgtcccaccgctgctgcaagcagtgagtgccgctctgaaccagcgcaactcctcttaatttttaaagtaacacacgagctaagaactaaggaggatttatgcgcagcatgcagtttgatgagtacggtgcacccctgaaagcgttctcatatgaagacccgaccccgcaagggaaggaagtagtcgttaggatcgaagcctgtggtgtgtgccactctgatattcatcttcacgagggctacttcgacatgggcggtggcaataaagctgatgttactcgtgctcgcgaactcccttttacattgggtcatgaaatcgttggcgaagtggtagcaactggaccaggtgtcaccggcgctaaaccgggcgacaaacgtattgtgtacccgtggatcgggtgcggcgactgcccgaaatgcaacagtggtgaggatcagtcctgtgcgcgtccacgtaacctgggtgttcacgttgacggtggctattcgacgcacgtaaagataccggacgaaaaattcctgttcgcctacgatggtattcctactgagttagcgggaacctatgcttgcagcggcatcaccgcttatggtgcactgatgaaagcaaaggaagcggctgaaagatctggctacatcggtctgattggcgctggtggcgttggcatggctggtctgatgctggccaaagcagcgatcggggctaaaactgtagtctttgatatcgacgacgcaaaactggaagctgcgacccgtgccggggcggattacgtgttcaactccggtgcaaaagaaacacgcaaggaagttatgaaactaacgaatggtggcctgtctggtgctgttgatttcgttggcagcgataaaagcgctctgtttggaatcaacgccttgggtcagaacggcgtgctggtcataattggactgttcggtggcgctatgactgttccggtacccctgttcccgctgaaagggatcaccgtacgtggctcatacgtaggttccctgcaagagatgagtgatatgatggagttagttcgcgctgggaaagttcctccgatgccggtaaaaactcggccactggacgctgcctgggaaacccttgaggatctacgccatggtaaaatcgtgggccgtgttgttctgaccccataagaaggagatatacatatgacccatcaattaagatcgcgcgatatcatcgctctgggctttatgacatttgcgttgttcgtcggcgcaggtaacattattttccctccaatggtcggcttgcaggcaggcgaacacgtctggactgcggcattcggcttcctcattactgccgttggcctaccggtattaacggtagtggcgctggcaaaagttggcggcggtgttgacagtctcagcacgccaattggtaaagtcgctggcgtactgctggcaacagtttgttacctggcggtggggccgctttttgctacgccgcgtacagctaccgtttcttttgaagtgggcattgcgccgctgacgggtgattccgcgctgccgctgtttatttacagcctggtctatttcgctatcgttattctggtttcgctctatccgggcaagctgctggataccgtgggcaacttccttgcgccgctgaaaattatcgcgctggtcatcctgtctgttgccgcaattatctggccggcgggttctatcagtacggcgactgaggcttatcaaaacgctgcgttttctaacggcttcgtcaacggctatctgaccatggatacgctgggcgcaatggtgtttggtatcgttattgttaacgcggcgcgttctcgtggcgttaccgaagcgcgtctgctgacccgttataccgtctgggctggcctgatggcgggtgttggtctgactctgctgtacctggcgctgttccgtctgggttcagacagcgcgtcgctggtcgatcagtctgcaaacggtgcggcgatcctgcatgcttacgttcagcatacctttggcggcggcggtagcttcctgctggcggcgttaatcttcatcgcctgcctggtcacggcggttggcctgacctgtgcttgtgcagaattcttcgcccagtacgtaccgctctcttatcgtacgctggtgtttatcctcggcggcttctcgatggtggtgtctaacctcggcttgagccagctgattcagatctctgtaccggtgctgaccgccatttatccgccgtgtatcgcactggttgtattaagttttacacgctcatggtggcataattcgtcccgcgtgattgctccgccgatgtttatcagcctgctttttggtattctcgacgggatcaaggcatctgcattcagcgatatcttaccgtcctgggcgcagcgtttaccgctggccgaacaaggtctggcgtggttaatgccaacagtggtgatggtggttctggccattatctgggatcgtgcggcaggtcgtcaggtgacctccagcgctcactaatacgcatggcatggatgaccgatggtagtgtgggctctccccatgcgagagtagggaactgccaggcat

SEQ ID NO: 47 - DNA, 5360 bp, Artificial Sequence
  Description of Artificial Sequence: Synthetic polynucleotide
gttgacactctatcattgatagagttattttaccactccctatcagtgatagagaaaagtgaaatattcacgtaaggaggtaatagatgcagatcttcgacactttgcaatcaatgggccatgagcaggttgtcctatgtagcgataagaccacgggtctgcgcgccattatcgctatacacgatacatccttagggccggcgcttggtggtacccgtatgtggcagtatgcaactgacgacgatgctattactgacgcactccgtctgtctcggggcatgacctacaaagctgcggtttctggcgtaaatctgggcggtggtaaagccgttatcatcggaaaccctcacagtgataaaagcgaagcgctgtttcgcgcttacggcagaatggtggaatcccagcgtgggcgttacatcaccgccgaagacgttggtactagcgtacgtgatatggagtggattcgcatggaaaccaaatatgtaacgggcgtgggtggcaacggaggctctggtgacccctctccagttaccgctctgggtgtttactcgggcatgaaggcatgcgctaaatcagtctatggtactgatgcgctgagcggtaaaaggatcgtggttcagggcgcgggtaacgttgcatcccatctggttcacagtctggtaaaagaaggcgctgtggttttcgtcactgacatctacgaagaaaaggccaaagcattagcggctgaaacgggcgctaccgtgattcgcaccgacgaggtttttactacacaatgcgatatcttctctccgaacgctctgggggccgtcctgaacgatgaaactattccgcagctcacatgcgctatcgtagctggtggtgcaaacaatcagcttaaaatcgaacaacgtcacgccacggctctgcaagagaaaggcattctgtatgcgccggattacgtaatcaacgccgggggcctcatgaatgtggcgagcgaagttgacggctacaaccgtgaaaaggttatgcgccaggctgaaggtatttacgatattactatgaacatcctaaataccgcgcgtgagcgtaacatcctgaccatcgaagcatccaacgcgattgctgaagagcggatcaacaaagttcgccatgttcacgggaacttcatcggttccccgtctattcgcggagtataataaatcaaaacaccaaattaaggagaaattttatgtcgacgacaaccgttggtgactacttgctgtatcgcttaaacgaaatcggcattgagcacctcttcggagtgccaggtgattacaatctgcaatttctggatcatgtaatcgaccaccctcagctgacttgggtcggctgcactaacgaacttaacgctgcctacgcagctgatggttatgcgcgttgtcgtccggctgcggcactgctgaccaccttcggggttggcgaactgagcgctattaatggcatcgcaggttcctacgcggagtatctgccggtaatacatatcgttggtgcaccgagtctatcagcccagcagcagggcgacctgattcaccactctcttggcgaaggtgatttttccagcttcctgaggatgtcccaaccggtgtctgttgcgcaggctgctctgactcctgataacgcatgcaaggaaatcgaccgcgtactggcggaagtcctcattcagcgtcgtcccggctacctgctgctgtctaccgacgtggctgctgcgccggcggctctgccacaaagcactctttctttgccgaccgccccggatcatcgcgcagttctggctgctttcagcgacgctgctgagcagatgctggctcaggccaaaagcgtctctctactggcggactttctggctgatcgtttcggtgttactcgagcactggccgcgtggcttcagcaggttccgctaccgcacgccactctgttaatgggtaaaggcgttctgagtgaacagcaaccagggttcgtgggtacctacgctggtgcggcatctatcgattcgacgcgtggcgcaatcgaagaagctggggtaattatcggagtgggagttagattttccgacactatcacagcaggcttctcgcagcagatcgacgcccgccgttttatagacattcaacccttcttctctcgtattggcgatcgccagtttgatcacttgccgatgcaggctgccgtcgcagccctgcatcaactgtgtcttcgttatcagcagcagtggtctatcaccgctcctagcccgcctgcactgccgccggctgctggtagcgagctgtcccagaacgcattctggcaggcgatgcagaacttcatccgccctggggacctgttggtggccgaccaaggtactgcggcgttcggcgcagcggcgctgcgcttaccgcagaattgccagctgcttgtgcagccgctgtggggctcaatcggttacagtctgccggccacctttggtgctcagacggcagatacagagcgtcgtgtaatcctaatcattggcgatggttcagcgcaattaactattcaggaactttccagtatgatgcgtgacggcttgaaacctatcatctttctcctgaacaacaacggttacaccgttgaacgggcgattcacggcgcggagcaacgttataacgatatcgctgcttggaattggacccaactgccccaggcgctgagtgttcattgcccagcgcagagctggcgagtcgttgaaacggtgcagctgaccgacgtaatgaaagtcatcgctgcttctccgcgtctgagcttggtagaagttgttctgcctgcaatggatgtcccaccgctgctgcaagcagtgagtgccgctctgaaccagcgcaactcctcttaatttttaaagtaacacacgagctaagaactaaggaggatttatgcgcagcatgcagtttgatgagtacggtgcacccctgaaagcgttctcatatgaagacccgaccccgcaagggaaggaagtagtcgttaggatcgaagcctgtggtgtgtgccactctgatattcatcttcacgagggctacttcgacatgggcggtggcaataaagctgatgttactcgtgctcgcgaactcccttttacattgggtcatgaaatcgttggcgaagtggtagcaactggaccaggtgtcaccggcgctaaaccgggcgacaaacgtattgtgtacccgtggatcgggtgcggcgactgcccgaaatgcaacagtggtgaggatcagtcctgtgcgcgtccacgtaacctgggtgttcacgttgacggtggctattcgacgcacgtaaagataccggacgaaaaattcctgttcgcctacgatggtattcctactgagttagcgggaacctatgcttgcagcggcatcaccgcttatggtgcactgatgaaagcaaaggaagcggctgaaagatctggctacatcggtctgattggcgctggtggcgttggcatggctggtctgatgctggccaaagcagcgatcggggctaaaactgtagtctttgatatcgacgacgcaaaactggaagctgcgacccgtgccggggcggattacgtgttcaactccggtgcaaaagaaacacgcaaggaagttatgaaactaacgaatggtggcctgtctggtgctgttgatttcgttggcagcgataaaagcgctctgtttggaatcaacgccttgggtcagaacggcgtgctggtcataattggactgttcggtggcgctatgactgttccggtacccctgttcccgctgaaagggatcaccgtacgtggctcatacgtaggttccctgcaagagatgagtgatatgatggagttagttcgcgctgggaaagttcctccgatgccggtaaaaactcggccactggacgctgcctgggaaacccttgaggatctacgccatggtaaaatcgtgggccgtgttgttctgaccccataagaaggagatatacatatgacccatcaattaagatcgcgcgatatcatcgctctgggctttatgacatttgcgttgttcgtcggcgcaggtaacattattttccctccaatggtcggcttgcaggcaggcgaacacgtctggactgcggcattcggcttcctcattactgccgttggcctaccggtattaacggtagtggcgctggcaaaagttggcggcggtgttgacagtctcagcacgccaattggtaaagtcgctggcgtactgctggcaacagtttgttacctggcggtggggccgctttttgctacgccgcgtacagctaccgtttcttttgaagtgggcattgcgccgctgacgggtgattccgcgctgccgctgtttatttacagcctggtctatttcgctatcgttattctggtttcgctctatccgggcaagctgctggataccgtgggcaacttccttgcgccgctgaaaattatcgcgctggtcatcctgtctgttgccgcaattatctggccggcgggttctatcagtacggcgactgaggcttatcaaaacgctgcgttttctaacggcttcgtcaacggctatctgaccatggatacgctgggcgcaatggtgtttggtatcgttattgttaacgcggcgcgttctcgtggcgttaccgaagcgcgtctgctgacccgttataccgtctgggctggcctgatggcgggtgttggtctgactctgctgtacctggcgctgttccgtctgggttcagacagcgcgtcgctggtcgatcagtctgcaaacggtgcggcgatcctgcatgcttacgttcagcatacctttggcggcggcggtagcttcctgctggcggcgttaatcttcatcgcctgcctggtcacggcggttggcctgacctgtgcttgtgcagaattcttcgcccagtacgtaccgctctcttatcgtacgctggtgtttatcctcggcggcttctcgatggtggtgtctaacctcggcttgagccagctgattcagatctctgtaccggtgctgaccgccatttatccgccgtgtatcgcactggttgtattaagttttacacgctcatggtggcataattcgtcccgcgtgattgctccgccgatgtttatcagcctgctttttggtattctcgacgggatcaaggcatctgcattcagcgatatcttaccgtcctgggcgcagcgtttaccgctggccgaacaaggtctggcgtggttaatgccaacagtggtgatggtggttctggccattatctgggatcgtgcggcaggtcgtcaggtgacctccagcgctcactaatacgcatggcatggatgaccgatggtagtgtgggctctccccatgcgagagtagggaactgccaggcat

SEQ ID NO: 48 - DNA, 5376 bp, Artificial Sequence
  Description of Artificial Sequence: Synthetic polynucleotide
gttgacactctatcattgatagagttattttaccactccctatcagtgatagagaaaagtgaaatattcacgtaaggaggtaatagatgcagatcttcgacactttgcaatcaatgggccatgagcaggttgtcctatgtagcgataagaccacgggtctgcgcgccattatcgctatacacgatacatccttagggccggcgcttggtggtacccgtatgtggcagtatgcaactgacgacgatgctattactgacgcactccgtctgtctcggggcatgacctacaaagctgcggtttctggcgtaaatctgggcggtggtaaagccgttatcatcggaaaccctcacagtgataaaagcgaagcgctgtttcgcgcttacggcagaatggtggaatcccagcgtgggcgttacatcaccgccgaagacgttggtactagcgtacgtgatatggagtggattcgcatggaaaccaaatatgtaacgggcgtgggtggcaacggaggctctggtgacccctctccagttaccgctctgggtgtttactcgggcatgaaggcatgcgctaaatcagtctatggtactgatgcgctgagcggtaaaaggatcgtggttcagggcgcgggtaacgttgcatcccatctggttcacagtctggtaaaagaaggcgctgtggttttcgtcactgacatctacgaagaaaaggccaaagcattagcggctgaaacgggcgctaccgtgattcgcaccgacgaggtttttactacacaatgcgatatcttctctccgaacgctctgggggccgtcctgaacgatgaaactattccgcagctcacatgcgctatcgtagctggtggtgcaaacaatcagcttaaaatcgaacaacgtcacgccacggctctgcaagagaaaggcattctgtatgcgccggattacgtaatcaacgccgggggcctcatgaatgtggcgagcgaagttgacggctacaaccgtgaaaaggttatgcgccaggctgaaggtatttacgatattactatgaacatcctaaataccgcgcgtgagcgtaacatcctgaccatcgaagcatccaacgcgattgctgaagagcggatcaacaaagttcgccatgttcacgggaacttcatcggttccccgtctattcgcggagtataataaatcaaaacaccaaattaaggagaaattttatgtcgacgacaaccgttggtgactacttgctgtatcgcttaaacgaaatcggcattgagcacctcttcggagtgccaggtgattacaatctgcaatttctggatcatgtaatcgaccaccctcagctgacttgggtcggctgcactaacgaacttaacgctgcctacgcagctgatggttatgcgcgttgtcgtccggctgcggcactgctgaccaccttcggggttggcgaactgagcgctattaatggcatcgcaggttcctacgcggagtatctgccggtaatacatatcgttggtgcaccgagtctatcagcccagcagcagggcgacctgattcaccactctcttggcgaaggtgatttttccagcttcctgaggatgtcccaaccggtgtctgttgcgcaggctgctctgactcctgataacgcatgcaaggaaatcgaccgcgtactggcggaagtcctcattcagcgtcgtcccggctacctgctgctgtctaccgacgtggctgctgcgccggcggctctgccacaaagcactctttctttgccgaccgccccggatcatcgcgcagttctggctgctttcagcgacgctgctgagcagatgctggctcaggccaaaagcgtctctctactggcggactttctggctgatcgtttcggtgttactcgagcactggccgcgtggcttcagcaggttccgctaccgcacgccactctgttaatgggtaaaggcgttctgagtgaacagcaaccagggttcgtgggtacctacgctggtgcggcatctatcgattcgacgcgtggcgcaatcgaagaagctggggtaattatcggagtgggagttagattttccgacactatcacagcaggcttctcgcagcagatcgacgcccgccgttttatagacattcaacccttcttctctcgtattggcgatcgccagtttgatcacttgccgatgcaggctgccgtcgcagccctgcatcaactgtgtcttcgttatcagcagcagtggtctatcaccgctcctagcccgcctgcactgccgccggctgctggtagcgagctgtcccagaacgcattctggcaggcgatgcagaacttcatccgccctggggacctgttggtggccgaccaaggtactgcggcgttcggcgcagcggcgctgcgcttaccgcagaattgccagctgcttgtgcagccgctgtggggctcaatcggttacagtctgccggccacctttggtgctcagacggcagatacagagcgtcgtgtaatcctaatcattggcgatggttcagcgcaattaactattcaggaactttccagtatgatgcgtgacggcttgaaacctatcatctttctcctgaacaacaacggttacaccgttgaacgggcgattcacggcgcggagcaacgttataacgatatcgctgcttggaattggacccaactgccccaggcgctgagtgttcattgcccagcgcagagctggcgagtcgttgaaacggtgcagctgaccgacgtaatgaaagtcatcgctgcttctccgcgtctgagcttggtagaagttgttctgcctgcaatggatgtcccaccgctgctgcaagcagtgagtgccgctctgaaccagcgcaactcctcttaattggataaagaataaggaggtattttatgacagcggagcagcaaaatggggtatccgactcacgccgtttcgaatttcaggaatttggtggccctatcgccccacagacctatcagctccccgcaccggctagcgatgaagttttgttaaaggtgaactactgcggtgtctgtcacagtgatgttcatcttcacgacggctacttcgagctgggtggcgataaacgtctgaacttcgctatgccgctgccgctgacgctgggtcacgaagtaattggcaccgttgtggctgtcggcgaccaggttactggtgtaaaaccgggggaccagcgactgatctatccgtggataggttgcggaaaatgcggcgcgtgtcaaaaaggagaagaaaacctgtgcgttactcctgcacatctgggcgtgaacaagccgggcggttacgctgatcacatcgttgtaccccattctcgctaccttctggacatttcgggtctgaacccgggtgatgccgctaccctcgcgtgctccggcctgaccactttcagcgcgatcaacaaagtgttgccgcttgcagatgaccagtggattgttgttatcggttgtggtggcctcggccagatggcgctgcgtatcctgcaagctatgggaattggcaatgttatcggtattgacctgtctgaagagaaacggaaactggctcatgaaagcggtgcacgtcactccttcgatccaaacactccgaagctgaaccgcgtggtcgccgaaacctgcccgggtacggtacaggccgcgttagactttgtgggcaatgagcaaactgctcagctggcactgtctctgcttggaaaaggtggcaaatatgttcctgtcgggctgcacggcggcgagctgcgttacccattgccgatcatcacgaacaaagctgtaagtatcatcggttcttacgttggtaccctgaaagaactggaagacttagttgctttcgccaaggaaaagaatctgccgccaattcatattgaacaccgcccgctggaatcggcggctcaggccgtagaggacctggaaaaaggacaggttgctgggcgtgttatcctggatgcaggtaactaagaaggagatatacatatgacccatcaattaagatcgcgcgatatcatcgctctgggctttatgacatttgcgttgttcgtcggcgcaggtaacattattttccctccaatggtcggcttgcaggcaggcgaacacgtctggactgcggcattcggcttcctcattactgccgttggcctaccggtattaacggtagtggcgctggcaaaagttggcggcggtgttgacagtctcagcacgccaattggtaaagtcgctggcgtactgctggcaacagtttgttacctggcggtggggccgctttttgctacgccgcgtacagctaccgtttcttttgaagtgggcattgcgccgctgacgggtgattccgcgctgccgctgtttatttacagcctggtctatttcgctatcgttattctggtttcgctctatccgggcaagctgctggataccgtgggcaacttccttgcgccgctgaaaattatcgcgctggtcatcctgtctgttgccgcaattatctggccggcgggttctatcagtacggcgactgaggcttatcaaaacgctgcgttttctaacggcttcgtcaacggctatctgaccatggatacgctgggcgcaatggtgtttggtatcgttattgttaacgcggcgcgttctcgtggcgttaccgaagcgcgtctgctgacccgttataccgtctgggctggcctgatggcgggtgttggtctgactctgctgtacctggcgctgttccgtctgggttcagacagcgcgtcgctggtcgatcagtctgcaaacggtgcggcgatcctgcatgcttacgttcagcatacctttggcggcggcggtagcttcctgctggcggcgttaatcttcatcgcctgcctggtcacggcggttggcctgacctgtgcttgtgcagaattcttcgcccagtacgtaccgctctcttatcgtacgctggtgtttatcctcggcggcttctcgatggtggtgtctaacctcggcttgagccagctgattcagatctctgtaccggtgctgaccgccatttatccgccgtgtatcgcactggttgtattaagttttacacgctcatggtggcataattcgtcccgcgtgattgctccgccgatgtttatcagcctgctttttggtattctcgacgggatcaaggcatctgcattcagcgatatcttaccgtcctgggcgcagcgtttaccgctggccgaacaaggtctggcgtggttaatgccaacagtggtgatggtggttctggccattatctgggatcgtgcggcaggtcgtcaggtgacctccagcgctcactaatacgcatggcatggatgaccgatggtagtgtgggctctccccatgcgagagtagggaactgccaggcat

SEQ ID NO: 49 - protein, 360 aa, Artificial Sequence
  Description of Artificial Sequence: Synthetic polypeptide
MNIFKKMEEFNYEQLVYFYDSETELKGITCIHNTTLGPALGGTRLWNYNSEEDAVEDVIRLARGMTYKAACAGLNLGGGKTVLIGDAKKIKSESYFRGLGRYVQSLNGRYITAEDVNTSTKDMAYVAMETDYVVGLGGKSGNPSPVTAYGAFMGIKAALMKKFEDSSIEGRTFAVQGAGQTGYYLIDYLLGNNKFKEKAKKIYFTEINESYIERMNKEHPEVEFISPDKIYSLEVDVFVPCALGKIVNDKTIDEFKCPIIAGTANNVLEREAHGNMLKERGILYAPDYVINAGGLINVYHELNGYNKENAILEVELIYDRLLEIFNIADSLNISTNIAANEFAEKRIKQIKSLKNNFIKR

SEQ ID NO: 50 - protein, 360 aa, Artificial Sequence; identical to SEQ ID NO: 49
  Description of Artificial Sequence: Synthetic polypeptide

SEQ ID NO: 51 - protein, 360 aa, Artificial Sequence; identical to SEQ ID NO: 49
  Description of Artificial Sequence: Synthetic polypeptide

SEQ ID NO: 52 - protein, 363 aa, Artificial Sequence
  Description of Artificial Sequence: Synthetic polypeptide
MVEIQALPETSIFGQIADHQHEQVVFCHDHETGLRAIIGIHNTVLGPALGGTRMWHYATEAEALNDVLRLSRGMTYKAAISGLNLGGGKAVIIGDAKTIKTEALLRKFGRFVQNLNGKYITAEDVNMTTKDMEYIRMETKHVAGLPESMGGSGDPSPVTAYGTYMGMKAAAKKAFGSDSLAGKRIAVQGVGHVGTYLLEHLTKEGAQIVLTDYYKERAEEAGARFGAQVVGLDDIYDQEVDIYSPCALGATINDDTIDRLRCAVVAGCANNQLKEENVHGPALVERGIVYAPDFLINAGGLINVYSEVTGSTRQGALTQTEKIYDYTLQVLEKAAAEGLHPQQAAIRQAEQRIAAIGKVKSTY

SEQ ID NO: 53 - protein, 363 aa, Artificial Sequence; identical to SEQ ID NO: 52
  Description of Artificial Sequence: Synthetic polypeptide

SEQ ID NO: 54 - protein, 363 aa, Artificial Sequence; identical to SEQ ID NO: 52
  Description of Artificial Sequence: Synthetic polypeptide

SEQ ID NO: 55 - protein, 366 aa, Artificial Sequence
  Description of Artificial Sequence: Synthetic polypeptide
MIFETISTSNHEEVVYCHNKDAGLKAIIAIHNTVLGPALGGTRMWPYASEEEALKDVLRLSRGMTYKAAVSGLNLGGGKAVIWGDPNKDKSEALFRAFGRFVNSLGGRYITAEDVGIDVNDMEYVLRETDYVTGVHQVHGGSGDPSPFTAYGTLQGLMAALQVKFGNEDVGNYSYAVQGVGHVGMEFVKLLRERGAKVFVTDINKDAVQRAVDEFGCEAVALDEIYDVDCDVYSPTALGGTVNDKTLPRLKCKVICGAANNQLANDEIGVELEKKGILYAPDYAVNAGGLMNVSLEIDGYNRERAMRMMRTIYYNLGRIFEISKRDGIPTFRAADRMAEERITAIGKLRLPHLGAAAPRFQGRRGN

SEQ ID NO: 56 - protein, 362 aa, Artificial Sequence
  Description of Artificial Sequence: Synthetic polypeptide
MQIFDTLQSMGHEQVVLCSDKTTGLRAIIAIHDTSLGPALGGTRMWQYATDDDAITDALRLSRGMTYKAAVSGVNLGGGKAVIIGNPHSDKSEALFRAYGRMVESQRGRYITAEDVGTSVRDMEWIRMETKYVTGVGGNGGSGDPSPVTALGVYSGMKACAKSVYGTDALSGKRIVVQGAGNVASHLVHSLVKEGAVVFVTDIYEEKAKALAAETGATVIRTDEVFTTQCDIFSPNALGAVLNDETIPQLTCAIVAGGANNQLKIEQRHATALQEKGILYAPDYVINAGGLMNVASEVDGYNREKVMRQAEGIYDITMNILNTARERNILTIEASNAIAEERINKVRHVHGNFIGSPSIRGV

SEQ ID NO: 57 - protein, 360 aa, Artificial Sequence; identical to SEQ ID NO: 49
  Description of Artificial Sequence: Synthetic polypeptide

SEQ ID NO: 58 - protein, 360 aa, Artificial Sequence; identical to SEQ ID NO: 49
  Description of Artificial Sequence: Synthetic polypeptide

SEQ ID NO: 59 - protein, 366 aa, Artificial Sequence; identical to SEQ ID NO: 55
  Description of Artificial Sequence: Synthetic polypeptide

SEQ ID NO: 60 - protein, 362 aa, Artificial Sequence; identical to SEQ ID NO: 56
  Description of Artificial Sequence: Synthetic polypeptide

SEQ ID NO: 61 - protein, 362 aa, Artificial Sequence; identical to SEQ ID NO: 56
  Description of Artificial Sequence: Synthetic polypeptide

SEQ ID NO: 62 - protein, 362 aa, Artificial Sequence; identical to SEQ ID NO: 56
  Description of Artificial Sequence: Synthetic polypeptide

SEQ ID NO: 63 - protein, 362 aa, Artificial Sequence; identical to SEQ ID NO: 56
  Description of Artificial Sequence: Synthetic polypeptide

SEQ ID NO: 64 - protein, 360 aa, Artificial Sequence; identical to SEQ ID NO: 49
  Description of Artificial Sequence: Synthetic polypeptide

SEQ ID NO: 65 - protein, 360 aa, Artificial Sequence; identical to SEQ ID NO: 49
  Description of Artificial Sequence: Synthetic polypeptide

SEQ ID NO: 66 - protein, 360 aa, Artificial Sequence; identical to SEQ ID NO: 49
  Description of Artificial Sequence: Synthetic polypeptide

SEQ ID NO: 67 - protein, 363 aa, Artificial Sequence; identical to SEQ ID NO: 52
  Description of Artificial Sequence: Synthetic polypeptide

SEQ ID NO: 68 - protein, 363 aa, Artificial Sequence; identical to SEQ ID NO: 52
  Description of Artificial Sequence: Synthetic polypeptide

SEQ ID NO: 69 - protein, 366 aa, Artificial Sequence; identical to SEQ ID NO: 55
  Description of Artificial Sequence: Synthetic polypeptide

SEQ ID NO: 70 - protein, 366 aa, Artificial Sequence; identical to SEQ ID NO: 55
  Description of Artificial Sequence: Synthetic polypeptide

SEQ ID NO: 71 - protein, 362 aa, Artificial Sequence; identical to SEQ ID NO: 56
  Description of Artificial Sequence: Synthetic polypeptide

SEQ ID NO: 72 - protein, 362 aa, Artificial Sequence; identical to SEQ ID NO: 56
  Description of Artificial Sequence: Synthetic polypeptide

SEQ ID NO: 73 - protein, 551 aa, Artificial Sequence
  Description of Artificial Sequence: Synthetic polypeptide
MSTTTVGDYLLYRLNEIGIEHLFGVPGDYNLQFLDHVIDHPQLTWVGCTNELNAAYAADGYARCRPAAALLTTFGVGELSAINGIAGSYAEYLPVIHIVGAPSLSAQQQGDLIHHSLGEGDFSSFLRMSQPVSVAQAALTPDNACKEIDRVLAEVLIQRRPGYLLLSTDVAAAPAALPQSTLSLPTAPDHRAVLAAFSDAAEQMLAQAKSVSLLADFLADRFGVTRALAAWLQQVPLPHATLLMGKGVLSEQQPGFVGTYAGAASIDSTRGAIEEAGVIIGVGVRFSDTITAGFSQQIDARRFIDIQPFFSRIGDRQFDHLPMQAAVAALHQLCLRYQQQWSITAPSPPALPPAAGSELSQNAFWQAMQNFIRPGDLLVADQGTAAFGAAALRLPQNCQLLVQPLWGSIGYSLPATFGAQTADTERRVILIIGDGSAQLTIQELSSMMRDGLKPIIFLLNNNGYTVERAIHGAEQRYNDIAAWNWTQLPQALSVHCPAQSWRVVETVQLTDVMKVIAASPRLSLVEVVLPAMDVPPLLQAVSAALNQRNSS

SEQ ID NO: 74 - protein, 551 aa, Artificial Sequence; identical to SEQ ID NO: 73
  Description of Artificial Sequence: Synthetic polypeptide

SEQ ID NO: 75 - protein, 551 aa, Artificial Sequence; identical to SEQ ID NO: 73
  Description of Artificial Sequence: Synthetic polypeptide

SEQ ID NO: 76 - protein, 551 aa, Artificial Sequence; identical to SEQ ID NO: 73
  Description of Artificial Sequence: Synthetic polypeptide

SEQ ID NO: 77 - protein, 551 aa, Artificial Sequence; identical to SEQ ID NO: 73
  Description of Artificial Sequence: Synthetic polypeptide

SEQ ID NO: 78 - protein, 551 aa, Artificial Sequence; identical to SEQ ID NO: 73
  Description of Artificial Sequence: Synthetic polypeptide

SEQ ID NO: 79 - protein, 551 aa, Artificial Sequence; identical to SEQ ID NO: 73
  Description of Artificial Sequence: Synthetic polypeptide

SEQ ID NO: 80 - protein, 551 aa, Artificial Sequence; identical to SEQ ID NO: 73
  Description of Artificial Sequence: Synthetic polypeptide

SEQ ID NO: 81 - protein, 551 aa, Artificial Sequence; identical to SEQ ID NO: 73
  Description of Artificial Sequence: Synthetic polypeptide

SEQ ID NO: 82 - protein, 551 aa, Artificial Sequence; identical to SEQ ID NO: 73
  Description of Artificial Sequence: Synthetic polypeptide

SEQ ID NO: 83 - protein, 551 aa, Artificial Sequence; identical to SEQ ID NO: 73
  Description of Artificial Sequence: Synthetic polypeptide

SEQ ID NO: 84 - protein, 551 aa, Artificial Sequence; identical to SEQ ID NO: 73
  Description of Artificial Sequence: Synthetic polypeptide

SEQ ID NO: 85 - protein, 551 aa, Artificial Sequence; identical to SEQ ID NO: 73
  Description of Artificial Sequence: Synthetic polypeptide

SEQ ID NO: 86 - protein, 551 aa, Artificial Sequence; identical to SEQ ID NO: 73
  Description of Artificial Sequence: Synthetic polypeptide

SEQ ID NO: 87 - protein, 551 aa, Artificial Sequence; identical to SEQ ID NO: 73
  Description of Artificial Sequence: Synthetic polypeptide

SEQ ID NO: 88 - protein, 551 aa, Artificial Sequence; identical to SEQ ID NO: 73
  Description of Artificial Sequence: Synthetic polypeptide

SEQ ID NO: 89 - protein, 551 aa, Artificial Sequence; identical to SEQ ID NO: 73
  Description of Artificial Sequence: Synthetic polypeptide

SEQ ID NO: 90 - protein, 551 aa, Artificial Sequence; identical to SEQ ID NO: 73
  Description of Artificial Sequence: Synthetic polypeptide

SEQ ID NO: 91 - protein, 551 aa, Artificial Sequence; identical to SEQ ID NO: 73
  Description of Artificial Sequence: Synthetic polypeptide

SEQ ID NO: 92 - protein, 551 aa, Artificial Sequence; identical to SEQ ID NO: 73
  Description of Artificial Sequence: Synthetic polypeptide

SEQ ID NO: 93 - protein, 562 aa, Artificial Sequence
  Description of Artificial Sequence: Synthetic polypeptide
MSEITLGRYLFERLNQLQVQTIFGLPGDFNLSLLDKIYEVDGMRWAGNANELNAAYAADGYSRVKGLACLVTTFGVGELSALNGVGGAYAEHVGLLHVVGVPSISSQAKQLLLHHTLGNGDFTVFHRMSNNISQTTAFISDINSAPGEIDRCIREAWVHQRPVYVGLPANLVDLTVPASLLDTPIDLSLKKNDPDAQEEVIETVLDLVDKSKNPIILVDACASRHSCRDEVRRLVDSTSFPVFVTPMGKSAVNESHPRFGGVYVGSLSEPNVKEAVENADLVLSIGALLSDFNTGSFSYSYKTKNIVEFHSDYTKIRQATFPGVQMKEALNVLLEKIPSHVANYKPLPVPQRRVIPSPGDKAAISQEWLWSRLSSWFREGDIVITETGTSAFGIVQSYFPDNCIGISQVLWGSIGFTVGATLGAVMAAQEIDPKKRVILFVGDGSLQLTVQEISTMVKWETTPYLFVLNNDGYTIERLIHGETATYNDIQPWDNLGLLPLFKARDYETNRVATVGEIEALFNNSAFNENTKIRMVEVMLPRMDAPQNLVKQAEFSSKTNSEN

SEQ ID NO: 94 - protein, 551 aa, Artificial Sequence; identical to SEQ ID NO: 73
  Description of Artificial Sequence: Synthetic polypeptide

SEQ ID NO: 95 - protein, 551 aa, Artificial Sequence; identical to SEQ ID NO: 73
  Description of Artificial Sequence: Synthetic polypeptide

SEQ ID NO: 96 - protein, 551 aa, Artificial Sequence; identical to SEQ ID NO: 73
  Description of Artificial Sequence: Synthetic polypeptide

SEQ ID NO: 97 - protein, 331 aa, Artificial Sequence
  Description of Artificial Sequence: Synthetic polypeptide
MQTAFLYKPGHENLVRSEIPIPKAGRGEVVLEIKAAGMCHSDLHVLDGGIPLPGQFVMGHEIVGTIHEIGQDVTGFKQGDLYAVHGPNPCGICTLCREGFDNDCTTVAKTGQWFGLGLDGGYQKYIRIPNVRSIVKVPEGVSAEAAASCTDAVLTPYRALKQAGASNSTRVLILGLGGLGLNALKLAKTFGSYVYASDLKPSAREAAKAAGADEVLESLPEDPLGVDIVLDVVGVQSTFNLAQKHVGPRGIIVPVGLASPQLSFNLTDLALREIRVQGTFWGTSNELAECLRLCQLGLINPKYTVVPLEEAPKYMEAMAHGKVEGRIVFHP

SEQ ID NO: 98 - protein, 350 aa, Artificial Sequence
  Description of Artificial Sequence: Synthetic polypeptide
MRSMQFDEYGAPLKAFSYEDPTPQGKEVVVRIEACGVCHSDIHLHEGYFDMGGGNKADVTRARELPFTLGHEIVGEVVATGPGVTGAKPGDKRIVYPWIGCGDCPKCNSGEDQSCARPRNLGVHVDGGYSTHVKIPDEKFLFAYDGIPTELAGTYACSGITAYGALMKAKEAAERSGYIGLIGAGGVGMAGLMLAKAAIGAKTVVFDIDDAKLEAATRAGADYVFNSGAKETRKEVMKLTNGGLSGAVDFVGSDKSALFGINALGQNGVLVIIGLFGGAMTVPVPLFPLKGITVRGSYVGSLQEMSDMMELVRAGKVPPMPVKTRPLDAAWETLEDLRHGKIVGRVVLTP

SEQ ID NO: 99 - protein, 360 aa, Artificial Sequence
  Description of Artificial Sequence: Synthetic polypeptide
MTAEQQNGVSDSRRFEFQEFGGPIAPQTYQLPAPASDEVLLKVNYCGVCHSDVHLHDGYFELGGDKRLNFAMPLPLTLGHEVIGTVVAVGDQVTGVKPGDQRLIYPWIGCGKCGACQKGEENLCVTPAHLGVNKPGGYADHIVVPHSRYLLDISGLNPGDAATLACSGLTTFSAINKVLPLADDQWIVVIGCGGLGQMALRILQAMGIGNVIGIDLSEEKRKLAHESGARHSFDPNTPKLNRVVAETCPGTVQAALDFVGNEQTAQLALSLLGKGGKYVPVGLHGGELRYPLPIITNKAVSIIGSYVGTLKELEDLVAFAKEKNLPPIHIEHRPLESAAQAVEDLEKGQVAGRVILDAGN

SEQ ID NO: 100 - protein, 331 aa, Artificial Sequence; identical to SEQ ID NO: 97
  Description of Artificial Sequence: Synthetic polypeptide

SEQ ID NO: 101 - protein, 350 aa, Artificial Sequence; identical to SEQ ID NO: 98
  Description of Artificial Sequence: Synthetic polypeptide

SEQ ID NO: 102 - protein, 360 aa, Artificial Sequence; identical to SEQ ID NO: 99
  Description of Artificial Sequence: Synthetic polypeptide

SEQ ID NO: 103 - protein, 350 aa, Artificial Sequence; identical to SEQ ID NO: 98
  Description of Artificial Sequence: Synthetic polypeptide

SEQ ID NO: 104 - protein, 350 aa, Artificial Sequence; identical to SEQ ID NO: 98
  Description of Artificial Sequence: Synthetic polypeptide

SEQ ID NO: 105 - protein, 350 aa, Artificial Sequence; identical to SEQ ID NO: 98
  Description of Artificial Sequence: Synthetic polypeptide

SEQ ID NO: 106 - protein, 350 aa, Artificial Sequence; identical to SEQ ID NO: 98
  Description of Artificial Sequence: Synthetic polypeptide

SEQ ID NO: 107 - protein, 360 aa, Artificial Sequence; identical to SEQ ID NO: 99
  Description of Artificial Sequence: Synthetic polypeptide

SEQ ID NO: 108 - protein, 360 aa, Artificial Sequence; identical to SEQ ID NO: 99
  Description of Artificial Sequence: Synthetic polypeptide

SEQ ID NO: 109 - protein, 350 aa, Artificial Sequence; identical to SEQ ID NO: 98
  Description of Artificial Sequence: Synthetic polypeptide

SEQ ID NO: 110 - protein, 360 aa, Artificial Sequence; identical to SEQ ID NO: 99
  Description of Artificial Sequence: Synthetic polypeptide

SEQ ID NO: 111 - protein, 331 aa, Artificial Sequence; identical to SEQ ID NO: 97
  Description of Artificial Sequence: Synthetic polypeptide

SEQ ID NO: 112 - protein, 360 aa, Artificial Sequence; identical to SEQ ID NO: 99
  Description of Artificial Sequence: Synthetic polypeptide

SEQ ID NO: 113 - protein, 350 aa, Artificial Sequence; identical to SEQ ID NO: 98
  Description of Artificial Sequence: Synthetic polypeptide

SEQ ID NO: 114 - protein, 360 aa, Artificial Sequence; identical to SEQ ID NO: 99
  Description of Artificial Sequence: Synthetic polypeptide

SEQ ID NO: 115 - protein, 350 aa, Artificial Sequence; identical to SEQ ID NO: 98
  Description of Artificial Sequence: Synthetic polypeptide

SEQ ID NO: 116 - protein, 360 aa, Artificial Sequence; identical to SEQ ID NO: 99
  Description of Artificial Sequence: Synthetic polypeptide

SEQ ID NO: 117 - protein, 331 aa, Artificial Sequence; identical to SEQ ID NO: 97
  Description of Artificial Sequence: Synthetic polypeptide

SEQ ID NO: 118 - protein, 350 aa, Artificial Sequence; identical to SEQ ID NO: 98
  Description of Artificial Sequence: Synthetic polypeptide

SEQ ID NO: 119 - protein, 350 aa, Artificial Sequence; identical to SEQ ID NO: 98
  Description of Artificial Sequence: Synthetic polypeptide

SEQ ID NO: 120 - protein, 360 aa, Artificial Sequence; identical to SEQ ID NO: 99
  Description of Artificial Sequence: Synthetic polypeptide

SEQ ID NO: 121 - protein, 439 aa, Artificial Sequence
  Description of Artificial Sequence: Synthetic polypeptide
MTHQLRSRDIIALGFMTFALFVGAGNIIFPPMVGLQAGEHVWTAAFGFLITAVGLPVLTVVALAKVGGGVDSLSTPIGKVAGVLLATVCYLAVGPLFATPRTATVSFEVGIAPLTGDSALPLFIYSLVYFAIVILVSLYPGKLLDTVGNFLAPLKIIALVILSVAAIIWPAGSISTATEAYQNAAFSNGFVNGYLTMDTLGAMVFGIVIVNAARSRGVTEARLLTRYTVWAGLMAGVGLTLLYLALFRLGSDSASLVDQSANGAAILHAYVQHTFGGGGSFLLAALIFIACLVTAVGLTCACAEFFAQYVPLSYRTLVFILGGFSMVVSNLGLSQLIQISVPVLTAIYPPCIALVVLSFTRSWWHNSSRVIAPPMFISLLFGILDGIKASAFSDILPSWAQRLPLAEQGLAWLMPTVVMVVLAIIWDRAAGRQVTSSAH

SEQ ID NO: 122 - protein, 439 aa, Artificial Sequence; identical to SEQ ID NO: 121
  Description of Artificial Sequence: Synthetic polypeptide

SEQ ID NO: 123 - protein, 439 aa, Artificial Sequence; identical to SEQ ID NO: 121
  Description of Artificial Sequence: Synthetic polypeptide

SEQ ID NO: 124 - protein, 439 aa, Artificial Sequence; identical to SEQ ID NO: 121
  Description of Artificial Sequence: Synthetic polypeptide

SEQ ID NO: 125 - protein, 439 aa, Artificial Sequence; identical to SEQ ID NO: 121
  Description of Artificial Sequence: Synthetic polypeptide

SEQ ID NO: 126 - protein, 439 aa, Artificial Sequence; identical to SEQ ID NO: 121
  Description of Artificial Sequence: Synthetic polypeptide

SEQ ID NO: 127 - protein, 439 aa, Artificial Sequence; identical to SEQ ID NO: 121
  Description of Artificial Sequence: Synthetic polypeptide

SEQ ID NO: 128 - protein, 439 aa, Artificial Sequence; identical to SEQ ID NO: 121
  Description of Artificial Sequence: Synthetic polypeptide

SEQ ID NO: 129 - protein, 439 aa, Artificial Sequence; identical to SEQ ID NO: 121
  Description of Artificial Sequence: Synthetic polypeptide

SEQ ID NO: 130 - protein, 439 aa, Artificial Sequence; identical to SEQ ID NO: 121
  Description of Artificial Sequence: Synthetic polypeptide

SEQ ID NO: 131 - protein, 439 aa, Artificial Sequence; identical to SEQ ID NO: 121
  Description of Artificial Sequence: Synthetic polypeptide

SEQ ID NO: 132 - protein, 439 aa, Artificial Sequence; identical to SEQ ID NO: 121
  Description of Artificial Sequence: Synthetic polypeptide

SEQ ID NO: 133 - protein, 439 aa, Artificial Sequence; identical to SEQ ID NO: 121
  Description of Artificial Sequence: Synthetic polypeptide

SEQ ID NO: 134 - protein, 439 aa, Artificial Sequence; identical to SEQ ID NO: 121
  Description of Artificial Sequence: Synthetic polypeptide

SEQ ID NO: 135 - protein, 439 aa, Artificial Sequence; identical to SEQ ID NO: 121
  Description of Artificial Sequence: Synthetic polypeptide

SEQ ID NO: 136 - protein, 439 aa, Artificial Sequence; identical to SEQ ID NO: 121
  Description of Artificial Sequence: Synthetic polypeptide

SEQ ID NO: 137 - protein, 439 aa, Artificial Sequence; identical to SEQ ID NO: 121
  Description of Artificial Sequence: Synthetic polypeptide

SEQ ID NO: 138 - protein, 439 aa, Artificial Sequence; identical to SEQ ID NO: 121
  Description of Artificial Sequence: Synthetic polypeptide

SEQ ID NO: 139 - protein, 439 aa, Artificial Sequence; identical to SEQ ID NO: 121
  Description of Artificial Sequence: Synthetic polypeptide

SEQ ID NO: 140 - protein, 439 aa, Artificial Sequence; identical to SEQ ID NO: 121
  Description of Artificial Sequence: Synthetic polypeptide

SEQ ID NO: 141 - protein, 439 aa, Artificial Sequence; identical to SEQ ID NO: 121
  Description of Artificial Sequence: Synthetic polypeptide

SEQ ID NO: 142 - protein, 439 aa, Artificial Sequence; identical to SEQ ID NO: 121
  Description of Artificial Sequence: Synthetic polypeptide

SEQ ID NO: 143 - protein, 439 aa, Artificial Sequence; identical to SEQ ID NO: 121
  Description of Artificial Sequence: Synthetic polypeptide

SEQ ID NO: 144 - protein, 439 aa, Artificial Sequence; identical to SEQ ID NO: 121
  Description of Artificial Sequence: Synthetic polypeptide

SEQ ID NO: 145 - DNA, 5597 bp, Artificial Sequence
  Description of Artificial Sequence: Synthetic polynucleotide
ccagtgaattcgttaagacccactttcacatttaagttgtttttctaatccgcatatgatcaattcaaggccgaataagaaggctggctctgcaccttggtgatcaaataattcgatagcttgtcgtaataatggcggcatactatcagtagtaggtgtttccctttcttctttagcgacttgatgctcttgatcttccaatacgcaacctaaagtaaaatgccccacagcgctgagtgcatataatgcattctctagtgaaaaaccttgttggcataaaaaggctaattgattttcgagagtttcatactgtttttctgtaggccgtgtacctaaatgtacttttgctccatcgcgatgacttagtaaagcacatctaaaacttttagcgttattacgtaaaaaatcttgccagctttccccttctaaagggcaaaagtgagtatggtgcctatctaacatctcaatggctaaggcgtcgagcaaagcccgcttattttttacatgccaatacaatgtaggctgctctacacctagcttctgggcgagtttacgggttgttaaaccttcgattccgacctcattaagcagctctaatgcgctgttaatcactttacttttatctaatctagacatcattaattcctaatttttgttgacactctatcattgatagagttattttaccactccctatcagtgatagagaaaagtgaactctagaaataattttgtttaactttaagaaggagatatacatatgaaacggaatgcgaaaactatcatcgcagggatgattgcactggcaatttcacacaccgctatggctgacgatattaaagtcgccgttgtcggcgcgatgtccggcccgattgcccagtggggcgatatggaatttaacggcgcgcgtcaggcaattaaagacattaatgccaaagggggaattaagggcgataaactggttggcgtggaatatgacgacgcatgcgacccgaaacaagccgttgcggtcgccaacaaaatcgttaatgacggcattaaatacgttattggtcatctgtgttcttcttctacccagcctgcgtcagatatctatgaagacgaaggtattctgatgatctcgccgggagcgaccaacccggagctgacccaacgcggttatcaacacattatgcgtactgccgggctggactcttcccaggggccaacggcggcaaaatacattcttgagacggtgaagccccagcgcatcgccatcattcacgacaaacaacagtatggcgaagggctggcgcgttcggtgcaggacgggctgaaagcggctaacgccaacgtcgtcttcttcgacggtattaccgccggggagaaagatttctccgcgctgatcgcccgcctgaaaaaagaaaacatcgacttcgtttactacggcggttactacccggaaatggggcagatgctgcgccaggcccgttccgttggcctgaaaacccagtttatggggccggaaggtgtgggtaatgcgtcgttgtcgaacattgccggtgatgccgccgaaggcatgttggtcactatgccaaaacgctatgaccaggatccggcaaaccagggcatcgttgatgcgctgaaagcagacaagaaagatccgtccgggccttatgtctggatcacctacgcggcggtgcaatctctggcgactgcccttgagcgtaccggcagcgatgagccgctggcgctggtgaaagatttaaaagctaacggtgcaaacaccgtgattgggccgctgaactgggatgaaaaaggcgatcttaagggatttgattttggtgtcttccagtggcacgccgacggttcatccacggcagccaagtgatcatcccaccgcccgtaaaatgcgggcgggtttagaaaggttaccttatgtctgagcagtttttgtatttcttgcagcagatgtttaacggcgtcacgctgggcagtacctacgcgctgatagccatcggctacaccatggtttacggcattatcggcatgatcaacttcgcccacggcgaggtttatatgattggcagctacgtctcatttatgatcatcgccgcgctgatgatgatgggcattgataccggctggctgctggtagctgcgggattcgtcggcgcaatcgtcattgccagcgcctacggctggagtatcgaacgggtggcttaccgcccggtgcgtaactctaagcgcctgattgcactcatctctgcaatcggtatgtccatcttcctgcaaaactacgtcagcctgaccgaaggttcgcgcgacgtggcgctgccgagcctgtttaacggtcagtgggtggtggggcatagcgaaaacttctctgcctctattaccaccatgcaggcggtgatctggattgttaccttcctcgccatgctggcgctgacgattttcattcgctattcccgcatgggtcgcgcgtgtcgtgcctgcgcggaagatctgaaaatggcgagtctgcttggcattaacaccgaccgggtgattgcgctgacctttgtgattggcgcggcgatggcggcggtggcgggtgtgctgctcggtcagttctacggcgtcattaacccctacatcggctttatggccgggatgaaagcctttaccgcggcggtgctcggtgggattggcagcattccgggagcgatgattggcggcctgattctggggattgcggaggcgctctcttctgcctatctgagtacggaatataaagatgtggtgtcattcgccctgctgattctggtgctgctggtgatgccgaccggtattctgggtcgcccggaggtagagaaagtatgaaaccgatgcatattgcaatggcgctgctctctgccgcgatgttctttgtgctggcgggcgtctttatgggcgtgcaactggagctggatggcaccaaactggtggtcgacacggcttcggatgtccgttggcagtgggtgtttatcggcacggcggtggtctttttcttccagcttttgcgaccggctttccagaaagggttgaaaagcgtttccggaccgaagtttattctgcccgccattgatggctccacggtgaagcagaaactgttcctcgtggcgctgttggtgcttgcggtggcgtggccgtttatggtttcacgcgggacggtggatattgccaccctgaccatgatctacattatcctcggtctggggctgaacgtggttgttggtctttctggtctgctggtgctggggtacggcggtttttacgccatcggcgcttacacttttgcgctgctcaatcactattacggcttgggcttctggacctgcctgccgattgctggattaatggcagcggcggcgggcttcctgctcggttttccggtgctgcgtttgcgcggtgactatctggcgatcgttaccctcggtttcggcgaaattgtgcgcatattgctgctcaataacaccgaaattaccggcggcccgaacggaatcagtcagatcccgaaaccgacactcttcggactcgagttcagccgtaccgctcgtgaaggcggctgggacacgttcagtaatttctttggcctgaaatacgatccctccgatcgtgtcatcttcctctacctggtggcgttgctgctggtggtgctaagcctgtttgtcattaaccgcctgctgcggatgccgctggggcgtgcgtgggaagcgttgcgtgaagatgaaatcgcctgccgttcgctgggcttaagcccgcgtcgtatcaagctgactgcctttaccataagtgccgcgtttgccggttttgccggaacgctgtttgcggcgcgtcagggctttgtcagcccggaatccttcacctttgccgaatcggcgtttgtgctggcgatagtggtgctcggcggtatgggctcgcaatttgcggtgattctggcggcaattttgctggtggtgtcgcgcgagttgatgcgtgatttcaacgaatacagcatgttaatgctcggtggtttgatggtgctgatgatgatctggcgtccgcagggcttgctgcccatgacgcgcccgcaactgaagctgaaaaacggcgcagcgaaaggagagcaggcatgagtcagccattattatctgttaacggcctgatgatgcgcttcggcggcctgctggcggtgaacaacgtcaatcttgaactgtacccgcaggagatcgtctcgttaatcggccctaacggtgccggaaaaaccacggtttttaactgtctgaccggattctacaaacccaccggcggcaccattttactgcgcgatcagcacctggaaggtttaccggggcagcaaattgcccgcatgggcgtggtgcgcaccttccagcatgtgcgtctgttccgtgaaatgacggtaattgaaaacctgctggtggcgcagcatcagcaactgaaaaccgggctgttctctggcctgttgaaaacgccatccttccgtcgcgcccagagcgaagcgctcgaccgcgccgcgacctggcttgagcgcattggtttgctggaacacgccaaccgtcaggcgagtaacctggcctatggtgaccagcgccgtcttgagattgcccgctgcatggtgacgcagccggagattttaatgctcgacgaacctgcggcaggtcttaacccgaaagagacgaaagagctggatgagctgattgccgaactgcgcaatcatcacaacaccactatcttgttgattgaacacgatatgaagctggtgatgggaatttcggaccgaatttacgtggtcaatcaggggacgccgctggcaaacggtacgccggagcagatccgtaataacccggacgtgatccgtgcctatttaggtgaggcataagatggaaaaagtcatgttgtcctttgacaaagtcagcgcccactacggcaaaatccaggcgctgcatgaggtgagcctgcatatcaatcagggcgagattgtcacgctgattggcgcgaacggggcggggaaaaccaccttgctcggcacgttatgcggcgatccgcgtgccaccagcgggcgaattgtgtttgatgataaagacattaccgactggcagacagcgaaaatcatgcgcgaagcggtggcgattgtcccggaagggcgtcgcgtcttctcgcggatgacggtggaagagaacctggcgatgggcggtttttttgctgaacgcgaccagttccaggagcgcataaagtgggtgtatgagctgtttccacgtctgcatgagcgccgtattcagcgggcgggcaccatgtccggcggtgaacagcagatgctggcgattggtcgtgcgctgatgagcaacccgcgtttgctactgcttgatgagccatcgctcggtcttgcgccgattatcatccagcaaattttcgacaccatcgagcagctgcgcgagcaggggatgactatctttctcgtcgagcagaacgccaaccaggcgctaaagctggcggatcgcggctacgtgctggaaaacggccatgtagtgctttccgatactggtgatgcgctgctggcgaatgaagcggtgagaagtgcgtatttaggcgggtaa

SEQ ID NO: 146 - DNA, 290 bp, Artificial Sequence
  Description of Artificial Sequence: Synthetic polynucleotide
gtcagcataacaccctgacctctcattaattgttcatgccgggcggcactatcgtcgtccggccttttcctctcttactctgctacgtacatctatttctataaatccgttcaatttgtctgttttttgcacaaacatgaaatatcagacaattccgtgacttaagaaaatttatacaaatcagcaatataccccttaaggagtatataaaggtgaatttgatttacatcaataagcggggttgctgaatcgttaaggtaggcggtaatagaaaagaaatcgaggcaaaa

SEQ ID NO: 147 - DNA, 173 bp, Artificial Sequence
  Description of Artificial Sequence: Synthetic polynucleotide
atttcctctcatcccatccggggtgagagtcttttcccccgacttatggctcatgcatgcatcaaaaaagatgtgagcttgatcaaaaacaaaaaatatttcactcgacaggagtatttatattgcgcccgttacgtgggcttcgactgtaaatcagaaaggagaaaacacct

SEQ ID NO: 148 - DNA, 305 bp, Artificial Sequence
  Description of Artificial Sequence: Synthetic polynucleotide
gtcagcataacaccctgacctctcattaattgttcatgccgggcggcactatcgtcgtccggccttttcctctcttactctgctacgtacatctatttctataaatccgttcaatttgtctgttttttgcacaaacatgaaatatcagacaattccgtgacttaagaaaatttatacaaatcagcaatataccccttaaggagtatataaaggtgaatttgatttacatcaataagcggggttgctgaatcgttaaggatccctctagaaataattttgtttaactttaagaaggagatatacat

SEQ ID NO: 149 - DNA, 180 bp, Artificial Sequence
  Description of Artificial Sequence: Synthetic polynucleotide
catttcctctcatcccatccggggtgagagtcttttcccccgacttatggctcatgcatgcatcaaaaaagatgtgagcttgatcaaaaacaaaaaatatttcactcgacaggagtatttatattgcgcccggatccctctagaaataattttgtttaactttaagaaggagatatacat

SEQ ID NO: 150 - DNA, 199 bp, Artificial Sequence
  Description of Artificial Sequence: Synthetic polynucleotide
agttgttcttattggtggtgttgctttatggttgcatcgtagtaaatggttgtaacaaaagcaatttttccggctgtctgtatacaaaaacgccgtaaagtttgagcgaagtcaataaactctctacccattcagggcaatatctctcttggatccctctagaaataattttgtttaactttaagaaggagatatacat

SEQ ID NO: 151 - DNA, 117 bp, Artificial Sequence
  Description of Artificial Sequence: Synthetic polynucleotide
atccccatcactcttgatggagatcaattccccaagctgctagagcgttaccttgcccttaaacattagcaatgtcgatttatcagagggccgacaggctcccacaggagaaaaccg

SEQ ID NO: 152 - DNA, 108 bp, Artificial Sequence
  Description of Artificial Sequence: Synthetic polynucleotide
ctcttgatcgttatcaattcccacgctgtttcagagcgttaccttgcccttaaacattagcaatgtcgatttatcagagggccgacaggctcccacaggagaaaaccg

SEQ ID NO: 153 - DNA, 290 bp, Artificial Sequence; identical to SEQ ID NO: 146
  Description of Artificial Sequence: Synthetic polynucleotide

SEQ ID NO: 154 - DNA, 433 bp, Artificial Sequence
  Description of Artificial Sequence: Synthetic polynucleotide
cggcccgatcgttgaacatagcggtccgcaggcggcactgcttacagcaaacggtctgtacgctgtcgtctttgtgatgtgcttcctgttaggtttcgtcagccgtcaccgtcagcataacaccctgacctctcattaattgctcatgccggacggcactatcgtcgtccggccttttcctctcttcccccgctacgtgcatctatttctataaacccgctcattttgtctattttttgcacaaacatgaaatatcagacaattccgtgacttaagaaaatttatacaaatcagcaatatacccattaaggagtatataaaggtgaatttgatttacatcaataagcggggttgctgaatcgttaaggtaggcggtaatagaaaagaaatcgaggcaaaaatgtttgtttaactttaagaaggagatatacat

SEQ ID NO: 155 - DNA, 290 bp, Artificial Sequence
  Description of Artificial Sequence: Synthetic polynucleotide
gtcagcataacaccctgacctctcattaattgctcatgccggacggcactatcgtcgtccggccttttcctctcttcccccgctacgtgcatctatttctataaacccgctcattttgtctattttttgcacaaacatgaaatatcagacaattccgtgacttaagaaaatttatacaaatcagcaatatacccattaaggagtatataaaggtgaatttgatttacatcaataagcggggttgctgaatcgttaaggtaggcggtaatagaaaagaaatcgaggcaaaa

SEQ ID NO: 156 - DNA, 173 bp, Artificial Sequence; identical to SEQ ID NO: 147
  Description of Artificial Sequence: Synthetic polynucleotide

SEQ ID NO: 157 - DNA, 305 bp, Artificial Sequence; identical to SEQ ID NO: 148
  Description of Artificial Sequence: Synthetic polynucleotide

SEQ ID NO: 158 - DNA, 180 bp, Artificial Sequence; identical to SEQ ID NO: 149
  Description of Artificial Sequence: Synthetic polynucleotide

SEQ ID NO: 159 - DNA, 199 bp, Artificial Sequence; identical to SEQ ID NO: 150
  Description of Artificial Sequence: Synthetic polynucleotide

SEQ ID NO: 160 - DNA, 207 bp, Artificial Sequence
  Description of Artificial Sequence: Synthetic polynucleotide
agttgttcttattggtggtgttgctttatggttgcatcgtagtaaatggttgtaacaaaagcaatttttccggctgtctgtatacaaaaacgccgcaaagtttgagcgaagtcaataaactctctacccattcagggcaatatctctcttggatccaaagtgaactctagaaataattttgtttaactttaagaaggagatatacat

SEQ ID NO: 161 - DNA, 390 bp, Artificial Sequence
  Description of Artificial Sequence: Synthetic polynucleotide
tcgtctttgtgatgtgcttcctgttaggtttcgtcagccgtcaccgtcagcataacaccctgacctctcattaattgctcatgccggacggcactatcgtcgtccggccttttcctctcttcccccgctacgtgcatctatttctataaacccgctcattttgtctattttttgcacaaacatgaaatatcagacaattccgtgacttaagaaaatttatacaaatcagcaatatacccattaaggagtatataaaggtgaatttgatttacatcaataagcggggttgctgaatcgttaaggtagaaatgtgatctagttcacatttgcggtaatagaaaagaaatcgaggcaaaaatgtttgtttaactttaagaaggagatatacat

SEQ ID NO: 162 - DNA, 200 bp, Artificial Sequence
  Description of Artificial Sequence: Synthetic polynucleotide
agttgttcttattggtggtgttgctttatggttgcatcgtagtaaatggttgtaacaaaagcaatttttccggctgtctgtatacaaaaacgccgcaaagtttgagcgaagtcaataaactctctacccattcagggcaatatctctcaaatgtgatctagttcacattttttgtttaactttaagaaggagatatacat

SEQ ID NO: 163 - DNA, 18 bp, Artificial Sequence
  Description of Artificial Sequence: Synthetic oligonucleotide
ttgttgayryrtcaacwa

SEQ ID NO: 164 - DNA, 15 bp, Artificial Sequence
  Description of Artificial Sequence: Synthetic oligonucleotide
  modified_base (8)..(8): a, c, t, g, unknown or other
ttataatnattataa

SEQ ID NO: 165 - DNA, 355 bp, Artificial Sequence
  Description of Artificial Sequence: Synthetic polynucleotide
tgtggcttttatgaaaatcacacagtgatcacaaattttaaacagagcacaaaatgctgcctcgaaatgagggcgggaaaataaggttatcagccttgttttctccctcattacttgaaggatatgaagctaaaacccttttttataaagcatttgtccgaattcggacataatcaaaaaagcttaattaagatcaatttgatctacatctctttaaccaacaatatgtaagatctcaactatcgcatccgtggattaattcaattataacttctctctaacgctgtgtatcgtaacggtaacactgtagaggggagcacattgatgcgaattcattaaagaggagaaaggtacc

SEQ ID NO: 166 - DNA, 228 bp, Artificial Sequence
  Description of Artificial Sequence: Synthetic polynucleotide
ttccgaaaattcctggcgagcagataaataagaattgttcttatcaatatatctaactcattgaatctttattagttttgtttttcacgcttgttaccactattagtgtgataggaacagccagaatagcggaacacatagccggtgctatacttaatctcgttaattactgggacataacatcaagaggatatgaaattcgaattcattaaagaggagaaaggtacc

SEQ ID NO: 167 - DNA, 334 bp, Artificial Sequence
  Description of Artificial Sequence: Synthetic polynucleotide
gcttagatcaggtgattgccctttgtttatgagggtgttgtaatccatgtcgttgttgcatttgtaagggcaacacctcagcctgcaggcaggcactgaagataccaaagggtagttcagattacacggtcacctggaaagggggccattttactttttatcgccgctggcggtgcaaagttcacaaagttgtcttacgaaggttgtaaggtaaaacttatcgatttgataatggaaacgcattagccgaatcggcaaaaattggttaccttacatctcatcgaaaacacggaggaagtatagatgcgaattcattaaagaggagaaaggtacc

SEQ ID NO: 168 - DNA, 134 bp, Artificial Sequence
  Description of Artificial Sequence: Synthetic polynucleotide
ctcgagttcattatccatcctccatcgccacgatagttcatggcgataggtagaatagcaatgaacgattatccctatcaagcattctgactgataattgctcacacgaattcattaaagaggagaaaggtacc

1. A recombinant bacterium capable of consuming leucine at a rate of at least about 0.5 μmol/10⁹ CFU/h in vitro.

2. The recombinant bacterium of claim 1, wherein the bacterium is capable of consuming leucine at a rate of at least about 0.75, 1, 1.25, 1.5, 1.75, 2, 2.25, 2.5, or 2.75 μmol/109 CFU/h.

3. The recombinant bacterium of claim 1, wherein the bacterium is capable of consuming leucine at a rate of about 2.5 to about 2.75 μmol/10⁹ CFU/h.

4. The recombinant bacterium of any one of the previous claims, wherein the bacterium comprises at least one gene sequence encoding at least one leucine catabolism enzyme operably linked to at least one directly or indirectly inducible promoter that is not associated with a gene encoding the at least one leucine catabolism enzyme in nature.

5. The recombinant bacterium of claim 4, wherein the promoter is selected from the group consisting of an FNRS promoter, a Pₜₑₜ promoter, a P_{cmt} promoter, an FNRS promoter, a P_{cl857} promoter, and a P_{BAD} promoter.

6. The recombinant bacterium of claim 4, wherein the at least one gene sequence encoding the at least one leucine catabolism enzyme is leuDH, kivD, and/or adh2.

7. The recombinant bacterium of claim 6, wherein the bacterium further comprises at least one gene sequence encoding at least one transporter capable of transporting leucine.

8. The recombinant bacterium of claim 7, wherein the at least one gene sequence encoding the at least one transporter is brnQ.

9. The recombinant bacterium of claim 8, wherein the bacterium comprises an operon, wherein the operon comprises leuDH, kivD, adh2, and brnQ.

10. The recombinant bacterium of claim 9, wherein the operon comprises a sequence having at least 90% identity to a sequence of any one of SEQ ID NOs: 25-48.

11. The recombinant bacterium of any one of claims 8-10,
wherein the leuDH gene encodes a LeuDH protein which comprises a sequence having at least 90% identity to a sequence of any one of SEQ ID NOs: 49-72;
wherein the kivD gene encodes a KivD protein which comprises a sequence having at least 90% identity to a sequence of any one of SEQ ID NOs: 73-96;
wherein the adh2 gene encodes an Adh2 protein which comprises a sequence having at least 90% identity to a sequence of any one of SEQ ID NOs: 97-120; and/or
wherein the brnQ gene encodes a BrnQ protein which comprises a sequence having at least 90% identity to a sequence of any one of SEQ ID NOs: 121-144.

12. A recombinant bacterium comprising an operon,
wherein the operon comprises an optimized leuDH gene which encodes a LeuDH protein, an optimized kivD gene which encodes a KivD protein, and an optimized adh2 gene which encodes an Adh2 protein, and an optimized brnQ gene which encodes a BrnQ protein,
wherein the operon comprises a sequence having at least 90% identity to a sequence of any one of SEQ ID NOs: 25-48, and
wherein the operon is operably linked to an inducible promoter that is not associated with a leuDH gene, a kivD gene, a adh2 gene, or a brnQ gene in nature.

13. The recombinant bacterium of claim 12, wherein the LeuDH protein comprises a sequence having at least 90% identity to a sequence of any one of SEQ ID NOs: 49-72.

14. The recombinant bacterium of claim 12 or claim 13, wherein the KivD protein comprises a sequence having at least 90% identity to a sequence of any one of SEQ ID NOs: 73-96.

15. The recombinant bacterium of any one of claims 12-14, wherein the Adh2 protein comprises a sequence having at least 90% identity to a sequence of any one of SEQ ID NOs: 97-120.

16. The recombinant bacterium of any one of claims 12-15, wherein the BrnQ protein comprises a sequence having at least 90% identity to a sequence of any one of SEQ ID NOs: 121-144.

17. The recombinant bacterium of any one of claims 4-8, wherein the at least one gene sequence encoding the at least one leucine catabolism enzyme and the inducible promoter, are integrated into the chromosome of the bacterium.

18. The recombinant bacterium of any one of claims 9-16, wherein the operon and the inducible promoter are integrated into the chromosome of the bacterium.

19. The recombinant bacterium of any one of claims 8-18, wherein the bacterium further comprises a second brnQ gene which encodes a second BmQ protein, wherein the second brnQ gene is operably linked to an inducible promoter that is not associated with a brnQ gene in nature, and wherein the second brnQ gene is inserted into the malE K or malP T locus on a chromosome of the bacterium.

20. The recombinant bacterium of any one of the previous claims, wherein the bacterium comprises a genetic modification in leuE that reduces leucine export from the bacterium.

21. The recombinant bacterium of any one of the previous claims, wherein the bacterium comprises a genetic modification in ilvC that reduces endogenous biosynthesis of leucine in the bacterium.

22. The recombinant bacterium of any one of the previous claims, wherein the bacterium further comprises a livKHMGF gene sequence encoding at least one transporter capable of transporting leucine.

23. The recombinant bacterium of claim 22, wherein the livKHMGF gene sequence is operably linked to at least one promoter that is not associated with a livKHMGF gene in nature.

24. The recombinant bacterium of any one of claims 12-23, wherein the bacterium is capable of consuming leucine at a rate of at least about 0.5 μmol/10⁹ CFU/h in vitro.

25. The recombinant bacterium of any one of the previous claims, wherein the bacterium is capable of producing isopentanol at a rate of at least about 0.2 μmol/10⁹ CFU/h in vitro.

26. The recombinant bacterium of claim 25, wherein the bacterium is capable of producing isopentanol at a rate of at least about 0.2 to 0.5 μmol/10⁹ CFU/h in vitro

27. The recombinant bacterium of any one of the previous claims, wherein the bacterium exhibits preferentially consumes leucine over valine and isoleucine.

28. The recombinant bacterium of claim 27, wherein the bacterium exhibits a leucine/valine activity ratio of at least about 1.1 to at least about 2.75.

29. The recombinant bacterium of claim 27 or claim 28, wherein the bacterium exhibits a leucine/isoleucine activity ratio of at least about 1.1 to at least about 5.

30. The recombinant bacterium of any one of the previous claims, wherein the bacterium is a probiotic bacterium selected from the group consisting of Bacteroides, Bifidobacterium, Clostridium, Escherichia, Lactobacillus, and Lactococcus.

31. The recombinant bacterium of claim 30, wherein the bacterium is Escherichia coli strain Nissle.

32. A pharmaceutically acceptable composition comprising the recombinant bacterium of any one of the previous claims and a pharmaceutically acceptable carrier.

33. A method of reducing the level of leucine in a subject, the method comprising a step of administering to the subject the pharmaceutically acceptable composition of claim 32.

34. A method of treating a disease associated with excess leucine and/or a metabolic disorder involving the abnormal catabolism of leucine in a subject, the method comprising a step of administering to the subject the pharmaceutically acceptable composition of claim 32.

35. The method of claim 33 or claim 34, wherein the subject has, or is suspected of having maple syrup urine disease (MSUD).
